(19) United States
(12) Patent Application Publication
(10) Pub. No.: US 2025/0213707 A1
(43) Pub. Date: Jul. 3, 2025

(54) COMPOUND FOR INCREASING EFFICACY OF ONCOLYTIC VIRUSES

(71) Applicant: ABLEVIA BIOTECH GMBH, Wien (AT)

(72) Inventor: OSKAR SMRZKA, Wien (AT)

(21) Appl. No.: 18/849,972

(22) PCT Filed: Mar. 24, 2023
(86) PCT No.: PCT/EP2023/057582

§ 371 Date: Sep. 23, 2024

(30) Foreign Application Priority Data
Mar. 24, 2022 (EP) 22164232.5

(51) Int. Cl. A61K 47/64; A61K 35/768; A61P 35/00

(52) U.S. Cl. CPC A61K 47/643; A61K 35/768; A61K 47/644; A61P 35/00

(57) ABSTRACT

A compound for sequestration of undesirable neutralizing antibodies against oncolytic viruses in a patient, which comprises an inert biopolymer scaffold and at least a first peptide n-mer of the general formula P (—S—P)₍ₙ₋₁₎ and a second peptide n-mer of the general formula P (—S—P)₍ₙ₋₁₎; wherein, independently for each occurrence, P is a peptide with a sequence length of 6-13 amino acids and S is a non-peptide spacer, wherein, independently for each of the peptide n-mers, n is an integer of at least 1, wherein each of the peptide n-mers is bound to the biopolymer scaffold. Independently for each occurrence, P has an amino-acid sequence comprising a sequence fragment with a length of at least six amino acids of a protein sequence of an oncolytic virus. Pharmaceutical compositions comprising the compound and methods.

[0001] The field of present invention relates to compounds for increasing efficiency of oncolytic viruses.

[0002] Oncolytic viruses, e.g. based on adenovirus (AdV), adeno-associated virus (AAV), measles virus, Herpes simplex virus (HSV), poxvirus, reovirus, Newcastle disease virus (NVD), rhabdovirus, coxsackievirus, lentivirus, alphavirus or flavivirus, are suitable for cancer therapy. Some of them are used in their naturally-occurring form and some of them are used when “armed” with engineered (transgenic) payloads in order to improve their potency (reviewed by Cristi et al, 2022). Numerous studies in tumour models demonstrated substantial tumour regression and prolonged survival rates (Lundstrom, 2018). Several clinical trials confirmed good safety profiles and therapeutic efficacy of oncolytic viruses. Gendicine, based on an oncolytic AdV, was approved for the treatment of head and neck squamous cell carcinoma in China (Zhang et al, 2018). More recently, an oncolytic HSV-1 was approved for the treatment of melanoma in the US and Europe under the name talimogene laherparepvec, “T-Vec” (Conry et al, 2018).

[0003] The emerging field of virus-mediated cancer treatments is extensively reviewed by Kontermann et al., 2021. A wide variety of oncolytic viruses for local or systemic application routes is nowadays available (see review by Cook et al., 2021). Further viral vector platforms include vesicular stomatitis virus (VSS), myxoma virus (MYXV), mengovirus, bovine viral diarrhea virus (BVDV), or chimeric constructs. An extensive review of oncolytic vectors is provided by Apolonio et al., 2021.

[0004] The oncotoxic effect of oncolytic viruses can be enhanced by inserting various classes of functional genes into the virus genome (as a payload), in order to boost its oncolytic function. This includes the insertion of sequences encoding for e.g. antibodies, bi-specific T cell engagers (BiTEs), bispecific adapter proteins or various forms of fusion proteins, possibly also in combination with chimeric antigen receptor (CAR)-T cell therapies. By these strategies, it is possible to deliver immune checkpoint inhibitors, anti-angiogenic antibodies, or other functional entities such as e.g. cytotoxic fusion proteins to the tumour or to hematologic neoplasms.

[0005] However, oncolytic virotherapy encounters resistance mechanisms due to the humoral or cellular immune responses of the host against the oncolytic viral vectors. Bhatt et al., 2021, review the various different types of resistance mechanisms, from interferon signalling to epigenetic- or hypoxia-mediated mechanisms.

[0006] Beside the innate immune responses to oncolytic virus vectors (including natural killer cells or interferon responses), the presence of neutralizing antibodies (nAbs) against an oncolytic vector may also lead to the inhibition and (premature) clearance of the vector. Various strategies were proposed to remove or avoid the effect of such nAbs, including PEGylation, encapsulation or polymers for blocking and shielding the viral vector, as e.g. reviewed by de Matos et al, 2020, or Engeland & Ungerechts, 2021.

[0007] Despite these efforts, there is still a need for new strategies for improving efficacy of oncolytic viruses.

[0008] It is thus an object of the present invention to provide compounds and methods which inhibit oncolytic virus neutralization. Thereby, the efficacy of the oncolytic virus in cancer (or, more generally, anti-neoplastic) therapy is typically increased.

[0009] The present invention provides a compound comprising
[0010] a biopolymer scaffold and at least
[0011] a first peptide n-mer of the general formula:

$$P {( - S - P )}_{( n - 1 )}$$

[0012] a second peptide n-mer of the general formula:

$$P {( - S - P )}_{( n - 1 )} .$$

[0013] Independently for each occurrence, P is a peptide with a sequence length of 6-13 amino acids, and S is a non-peptide spacer. Independently for each of the peptide n-mers, n is an integer of at least 1, preferably of at least 2, more preferably of at least 3, especially of at least 4. Each of the peptide n-mers is bound to the biopolymer scaffold, preferably via a linker each. Further, independently for each occurrence, P has an amino-acid sequence comprising a sequence fragment with a length of at least six, preferably at least seven, more preferably at least eight, especially at least 9 (or 10, 11, 12 or 13) amino acids of a protein sequence (preferably a capsid protein sequence, nucleocapsid protein sequence, a structural protein sequence, viral envelope- or receptor-binding-protein sequence, tegument protein sequence, viral enzyme sequence, nuclear matrix protein sequence, DNA- or RNA-binding protein sequence, viral packaging protein sequence or viral polymerase sequence, more preferably a capsid protein sequence, nucleocapsid protein sequence, a structural protein sequence, viral envelope- or receptor-binding-protein sequence, or a tegument protein sequence, in particular a capsid protein sequence) of a (non-pathogenic) oncolytic virus (such as AAV or AdV or measles virus), in particular of an AdV hexon protein sequence, an AdV fiber protein sequence, an AdV penton protein sequence, an AdV IIIa protein sequence, an AdV VI protein sequence, an AdV VIII protein sequence or an AdV IX protein sequence or of any one of the capsid protein sequences identified in FIG. 4 and FIG. 5 or of any one of the capsid protein sequences listed in Cearley et al., 2008, or of a capsid protein sequence identified by any one of UniProt P03525, P03526, P03527, P03528, P03529, P0CK31, P11078, P11079, P12418, P12419, P15024, P21270, A1Z0P5, O09800, P03170, P04288, P04289, P04291, P04486, P06477, P06484, P06487, P06491, P08314, P08392, P08543, P10185, P10190, P10191, P10192, P10193, P10200, P10202, P10204, P10205, P10210, P10216, P10218, P10219, P10220, P10225, P10227, P10228, P10229, P10231, P10234, P32888, P68333, P08362, P35971, Q89933, P35974, P35976, P69358, P12576, Q9EMA9 and P03522. Optionally at most three, preferably at most two, most preferably at least one amino acid of the sequence fragment is independently substituted by any other amino acid.

[0014] Preferably, at least one occurrence of P is Pₐ and/or at least one occurrence of P is P_{b}. Pₐ is a defined peptide (i.e. a peptide of defined sequence) with a sequence length of 6-13 amino acids, preferably 7-11 amino acids, more preferably 7-9 amino acids. P_{b} is a defined peptide (i.e. a peptide of defined sequence) with a sequence length of 6-13 amino acids, preferably 7-11 amino acids, more preferably 7-9 amino acids.

[0015] The present invention also provides a compound comprising
[0016] a biopolymer scaffold and at least
[0017] a first peptide n-mer which is a peptide dimer of the formula Pₐ—S—Pₐ or Pₐ—S—P_{b}, wherein Pₐ is a defined peptide (i.e. a peptide of defined sequence) with a sequence length of 6-13 amino acids, preferably 7-11 amino acids, more preferably 7-9 amino acids, P_{b} is a defined peptide (i.e. a peptide of defined sequence) with a sequence length of 6-13 amino acids, preferably 7-11 amino acids, more preferably 7-9 amino acids, and S is a non-peptide spacer, wherein the first peptide n-mer is bound to the biopolymer scaffold, preferably via a linker. Pₐ has an amino-acid sequence comprising a sequence fragment with a length of at least six, preferably at least seven, more preferably at least eight, especially at least 9 (or 10, 11, 12 or 13) amino acids of a protein sequence (preferably a capsid protein sequence, nucleocapsid protein sequence, a structural protein sequence, viral envelope- or receptor-binding-protein sequence, tegument protein sequence, viral enzyme sequence, nuclear matrix protein sequence, DNA- or RNA-binding protein sequence, viral packaging protein sequence or viral polymerase sequence, more preferably a capsid protein sequence, nucleocapsid protein sequence, a structural protein sequence, viral envelope- or receptor-binding-protein sequence, or a tegument protein sequence, in particular a capsid protein sequence) of a (non-pathogenic) oncolytic virus, in particular of an AdV hexon protein sequence, an AdV fiber protein sequence, an AdV penton protein sequence, an AdV IIIa protein sequence, an AdV VI protein sequence, an AdV VIII protein sequence or an AdV IX protein sequence or of any one of the capsid protein sequences identified in FIG. 4 and FIG. 5 or of any one of the capsid protein sequences listed in Cearley et al., 2008, or of a capsid protein sequence identified by any one of UniProt P03525, P03526, P03527, P03528, P03529, P0CK31, P11078, P11079, P12418, P12419, P15024, P21270, A1Z0P5, O09800, P03170, P04288, P04289, P04291, P04486, P06477, P06484, P06487, P06491, P08314, P08392, P08543, P10185, P10190, P10191, P10192, P10193, P10200, P10202, P10204, P10205, P10210, P10216, P10218, P10219, P10220, P10225, P10227, P10228, P10229, P10231, P10234, P32888, P68333, P08362, P35971, Q89933, P35974, P35976, P69358, P12576, Q9EMA9 and P03522. Optionally at most three, preferably at most two, most preferably at least one amino acid of the sequence fragment is independently substituted by any other amino acid.

[0018] This compound preferably comprises a second peptide n-mer which is a peptide dimer of the formula P_{b}—S—P_{b} or Pₐ—S—P_{b}, wherein the second peptide n-mer is bound to the biopolymer scaffold, preferably via a linker. P_{b} has an amino-acid sequence comprising a sequence fragment with a length of at least six, preferably at least seven, more preferably at least eight, especially at least 9 (or 10, 11, 12 or 13) amino acids of a protein sequence (preferably a capsid protein sequence, nucleocapsid protein sequence, a structural protein sequence, viral envelope- or receptor-binding-protein sequence, tegument protein sequence, viral enzyme sequence, nuclear matrix protein sequence, DNA- or RNA-binding protein sequence, viral packaging protein sequence or viral polymerase sequence, more preferably a capsid protein sequence, nucleocapsid protein sequence, a structural protein sequence, viral envelope- or receptor-binding-protein sequence, or a tegument protein sequence, in particular a capsid protein sequence) of a (non-pathogenic) oncolytic virus, in particular of an AdV hexon protein sequence, an AdV fiber protein sequence, an AdV penton protein sequence, an AdV IIIa protein sequence, an AdV VI protein sequence, an AdV VIII protein sequence or an AdV IX protein sequence or of any one of the capsid protein sequences identified in FIG. 4 and FIG. 5 or of any one of the capsid protein sequences listed in Cearley et al., 2008, or of a capsid protein sequence identified by any one of UniProt P03525, P03526, P03527, P03528, P03529, P0CK31, P11078, P11079, P12418, P12419, P15024, P21270, A1Z0P5, O09800, P03170, P04288, P04289, P04291, P04486, P06477, P06484, P06487, P06491, P08314, P08392, P08543, P10185, P10190, P10191, P10192, P10193, P10200, P10202, P10204, P10205, P10210, P10216, P10218, P10219, P10220, P10225, P10227, P10228, P10229, P10231, P10234, P32888, P68333, P08362, P35971, Q89933, P35974, P35976, P69358, P12576, Q9EMA9 and P03522. Optionally at most three, preferably at most two, most preferably at least one amino acid of the sequence fragment is independently substituted by any other amino acid.

[0019] Furthermore, the present invention provides a pharmaceutical composition comprising any one of the aforementioned compounds and at least one pharmaceutically acceptable excipient. Preferably, this pharmaceutical composition is for use in therapy, preferably therapy of a neoplasm such as a benign neoplasm, an in situ neoplasm or a malignant neoplasm, especially therapy of a solid tumor or a hematological malignancy.

[0020] In another aspect, the present invention provides a method of (transiently) sequestering (or depleting) one or more antibodies present in an individual, comprising obtaining a pharmaceutical composition as defined herein, the composition being non-immunogenic in the individual, where the one or more antibodies present in the individual are specific for at least one occurrence of P, or for peptide Pₐ and/or peptide P_{b}; and administering the pharmaceutical composition to the individual.

[0021] In yet another aspect, the present invention relates to a pharmaceutical composition (i.e. an anti-neoplastic composition), comprising the compound defined herein and further comprising the oncolytic virus (or oncolytic virus-like particle-VLP) and optionally at least one pharmaceutically acceptable excipient. The oncolytic virus typically comprises a peptide fragment with a sequence length of at least six, preferably at least seven, more preferably at least eight, especially at least 9 amino acids. The sequence of at least one occurrence of peptide P, or peptide Pₐ and/or peptide P_{b}, of the compound is at least 70% identical, preferably at least 75% identical, more preferably at least 80% identical, yet more preferably at least 85% identical, even more preferably at least 90% identical, yet even more preferably at least 95% identical, especially completely identical to the sequence of said peptide fragment. Preferably, this pharmaceutical composition is for use in therapy, preferably therapy of a neoplasm such as a benign neoplasm, an in situ neoplasm or an malignant neoplasm, especially therapy of a solid tumor or a hematological malignancy and/or for use in prevention or inhibition of an undesirable (humoral) immune reaction against the oncolytic virus (or VLP).

[0022] In even yet another aspect, the present invention provides a method of inhibiting a (undesirable)-especially humoral-immune reaction to a treatment with a anti-neoplastic composition in an individual in need of treatment with the anti-neoplastic composition or of inhibiting neutralization of an oncolytic virus in an anti-neoplastic composition for an individual in need of treatment with the anti-neoplastic composition, comprising obtaining said anti-neoplastic composition; wherein the compound of the anti-neoplastic composition is non-immunogenic in the individual, and administering the anti-neoplastic composition to the individual (preferably systemically or locally, especially systemically).

[0023] The neutralizing and inhibitory antibodies against the oncolytic virus also enhance the immune-stimulatory, anti-tumoral activity. Pre-existing inhibitory and at the same time also beneficial antibodies against the oncolytic vector are therefore a double-edged sword.

[0024] In other words, on one hand, the immune stimulatory function of oncolytic viruses supports their beneficial effect against cancer cells. On the other hand, the immune stimulatory function may at the same time inhibit oncolytic vector delivery, thereby reducing target access and therapeutic efficacy.

[0025] The present invention is suitable for providing a solution in the face of these conflicting goals: In the first phase, nABs are selectively removed by administering the compound of the present invention. This allows for efficient delivery of oncolytic virus vector to the target tissue upon virus administration (especially when the oncolytic virus or VLP is administered systemically—a scenario in which the present invention is especially effective). Since the compound of the present invention will eventually be removed from circulation, the nAb titer will recover after a time window e.g. of few days. The nAbs will then contribute to the required immunostimulatory function of the oncolytic virus.

[0026] It turned out that the present invention provides a highly suitable transient window for oncolytic virus administration (see e.g. Example 1 and FIGS. 1 and 2). This window is typically diminished when the anti-oncolytic antibody titer recovers. The inventive selective antibody depletion compounds (SADCs, based on the concept generally disclosed first in WO 2020/193486 A1) are therefore well suited for enhancing the effect of locally or systemically applied oncolytic viruses or virus-like particles (VLPs) for targeting solid tumors as well as hematological malignancies.

[0027] In addition to their functional utility, polyvalent, peptide-based SADCs with non-immunogenic peptides attached to a non-immunogenic “self”-scaffold protein have another general immunosafety advantage over similar biotherapeutic constructs carrying e.g. DNA or RNA aptamers for sequestering unwanted or harmful antibodies. While it would certainly be possible to manufacture such constructs with a therapeutic effect, in contrast to the present invention, a DNA- or RNA-aptamer based construct would have the inherent risk of acting like a pathogen-associated molecular pattern (PAMP), especially if it would be attached in polyvalent form to a scaffold protein. DNA or RNA aptamer molecules bound to a protein carrier (such as e.g. human albumin or human transferrin) have the inherent risk of triggering the innate immune response via Toll-like receptors (TLRs) and to induce to excess cytokine production with harmful side effects, as reviewed in Bruno, 2018.

[0028] The detailed description given below relates to all of the above aspects of the invention unless explicitly excluded.

[0029] In general, antibodies are essential components of the humoral immune system, offering protection from infections by foreign organisms including bacteria, viruses, fungi or parasites. However, under certain circumstances-including autoimmune diseases, organ transplantation, blood transfusion or upon administration of biomolecular drugs or gene delivery vectors-antibodies can target the patient's own body (or the foreign tissue or cells or the biomolecular drug or vector just administered), thereby turning into harmful or disease-causing entities. Certain antibodies can also interfere with probes for diagnostic imaging. In the following, such antibodies are generally referred to as “undesired antibodies” or “undesirable antibodies” (as explained above, whether a given antibody is “undesired” may depend on the circumstances; in the case of oncolytic viruses, generally only transient antibody depletion allowing efficient delivery of the virus to the target is preferred).

[0030] With few exceptions, selective removal of undesired antibodies has not reached clinical practice. It is presently restricted to very few indications: One of the known techniques for selective antibody removal (although not widely established) is immunoapheresis. In contrast to immunoapheresis (which removes immunoglobulin), selective immunoapheresis involves the filtration of plasma through an extracorporeal, selective antibody-adsorber cartridge that will deplete the undesired antibody based on selective binding to its antigen binding site. Selective immunoapheresis has for instance been used for removing anti-A or anti-B antibodies from the blood prior to ABO-incompatible transplantation or with respect to indications in transfusion medicine (Teschner et al). Selective apheresis was also experimentally applied in other indications, such as neuroimmunological indications (Tetala et al) or myasthenia gravis (Lazaridis et al), but is not yet established in the clinical routine. One reason that selective immunoapheresis is only hesitantly applied is the fact that it is a cost intensive and cumbersome intervention procedure that requires specialized medical care. Moreover, it is not known in the prior art how to deplete undesired antibodies rapidly and efficiently.

[0031] Unrelated to apheresis, Morimoto et al. discloses dextran as a generally applicable multivalent scaffold for improving immunoglobulin-binding affinities of peptide and peptidomimetic ligands such as the FLAG peptide. WO 2011/130324 A1 relates to compounds for prevention of cell injury. EP 3 059 244 A1 relates to a C-met protein agonist.

[0032] As mentioned, apheresis is applied extracorporeally. By contrast, also several approaches to deplete undesirable antibodies intracorporeally were proposed in the prior art, mostly in connection with certain autoimmune diseases involving autoantibodies or anti-drug antibodies:

[0033] Lorentz et al discloses a technique whereby erythrocytes are charged in situ with a tolerogenic payload driving the deletion of antigen-specific T cells. This is supposed to ultimately lead to reduction of the undesired humoral response against a model antigen. A similar approach is proposed in Pishesha et al. In this approach, erythrocytes are loaded ex vivo with a peptide-antigen construct that is covalently bound to the surface and reinjected into the animal model for general immunotolerance induction.

[0034] WO 92/13558 A1 relates to conjugates of stable nonimmunogenic polymers and analogs of immunogens that possess the specific B cell binding ability of the immunogen and which, when introduced into individuals, induce humoral anergy to the immunogen. Accordingly, these conjugates are disclosed to be useful for treating antibody-mediated pathologies that are caused by foreign- or self-immunogens. In this connection, see also EP 0 498 658 A2.

[0035] Taddeo et al discloses selectively depleting antibody producing plasma cells using anti-CD138 antibody derivatives fused to an ovalbumin model antigen thereby inducing receptor crosslinking and cell suicide in vitro selectively in those cells that express the antibody against the model antigen.

[0036] Apitope International NV (Belgium) is presently developing soluble tolerogenic T-cell epitope peptides which may lead to expression of low levels of co-stimulatory molecules from antigen presenting cells inducing tolerance, thereby suppressing antibody response (see e.g. Jansson et al). These products are currently under preclinical and early clinical evaluation, e.g. in multiple sclerosis, Grave's disease, intermediate uveitis, and other autoimmune conditions as well as Factor VIII intolerance.

[0037] Similarly, Selecta Biosciences, Inc. (USA) is currently pursuing strategies of tolerance induction by so-called Synthetic Vaccine Particles (SVPs). SVP-Rapamycin is supposed to induce tolerance by preventing undesired antibody production via selectively inducing regulatory T cells (see Mazor et al).

[0038] Mingozzi et al discloses decoy adeno-associated virus (AAV) capsids that adsorb antibodies but cannot enter a target cell.

[0039] WO 2015/136027 A1 discloses carbohydrate ligands presenting the minimal Human Natural Killer-1 (HNK-1) epitope that bind to anti-MAG (myelin-associated glycoprotein) IgM antibodies, and their use in diagnosis as well as for the treatment of anti-MAG neuropathy. WO 2017/046172 A1 discloses further carbohydrate ligands and moieties, respectively, mimicking glycoepitopes comprised by glycosphingolipids of the nervous system which are bound by anti-glycan antibodies associated with neurological diseases. The document further relates to the use of these carbohydrate ligands/moieties in diagnosis as well as for the treatment of neurological diseases associated with anti-glycan antibodies.

[0040] US 2004/0258683 A1 discloses methods for treating systemic lupus erythematosus (SLE) including renal SLE and methods of reducing risk of renal flare in individuals with SLE, and methods of monitoring such treatment. One disclosed method of treating SLE including renal SLE and reducing risk of renal flare in an individual with SLE involves the administration of an effective amount of an agent for reducing the level of anti-double-stranded DNA (dsDNA) antibody, such as a dsDNA epitope as in the form of an epitope-presenting carrier or an epitope-presenting valency platform molecule, to the individual.

[0041] US patent no. 5, 637, 454 relates to assays and treatments of autoimmune diseases. Agents used for treatment might include peptides homologous to the identified antigenic, molecular mimicry sequences. It is disclosed that these peptides could be delivered to a patient in order to decrease the amount of circulating antibody with a particular specificity.

[0042] US 2007/0026396 A1 relates to peptides directed against antibodies, which cause cold-intolerance, and the use thereof. It is taught that by using the disclosed peptides, in vivo or ex vivo neutralization of undesired autoantibodies is possible. A comparable approach is disclosed in WO 1992/014150 A1 or in WO 1998/030586 A2.

[0043] WO 2018/102668 A1 discloses a fusion protein for selective degradation of disease-causing or otherwise undesired antibodies. The fusion protein (termed “Seldeg”) includes a targeting component that specifically binds to a cell surface receptor or other cell surface molecule at near-neutral pH, and an antigen component fused directly or indirectly to the targeting component. Also disclosed is a method of depleting a target antigen-specific antibody from a patient by administering to the patient a Seldeg having an antigen component configured to specifically bind the target antigen-specific antibody.

[0044] WO 2015/181393 A1 concerns peptides grafted into sunflower-trypsin-inhibitor-(SFTI-) and cyclotide-based scaffolds. These peptides are disclosed to be effective in autoimmune disease, for instance citrullinated fibrinogen sequences that are grafted into the SFTI scaffold have been shown to block autoantibodies in rheumatoid arthritis and inhibit inflammation and pain. These scaffolds are disclosed to be non-immunogenic.

[0045] Erlandsson et al discloses in vivo clearing of idiotypic antibodies with anti-idiotypic antibodies and their derivatives.

[0046] Berlin Cures Holding AG (Germany) has proposed an intravenous broad spectrum neutralizer DNA aptamer (see e.g. WO 2016/020377 A1 and WO 2012/000889 A1) for the treatment of dilated cardiomyopathy and other GPCR-autoantibody related diseases that in high dosage is supposed to block autoantibodies by competitive binding to the antigen binding regions of autoantibodies. In general, aptamers did not yet achieve a breakthrough and are still in a preliminary stage of clinical development. The major concerns are still biostability and bioavailability, constraints such as nuclease sensitivity, toxicity, small size and renal clearance. A particular problem with respect to their use as selective antibody antagonists are their propensity to stimulate the innate immune response.

[0047] WO 00/33887 A2 discloses methods for reducing circulating levels of antibodies, particularly disease-associated antibodies. The methods entail administering effective amounts of epitope-presenting carriers to an individual. In addition, ex vivo methods for reducing circulating levels of antibodies are disclosed which employ epitope-presenting carriers.

[0048] U.S. Pat. No. 6,022,544 A relates to a method for reducing an undesired antibody response in a mammal by administering to the mammal a non-immunogenic construct which is free of high molecular weight immunostimulatory molecules. The construct is disclosed to contain at least two copies of a B cell membrane immunoglobulin receptor epitope bound to a pharmaceutically acceptable non-immunogenic carrier.

[0049] WO 2020/193486 A1 relates to a compound for the sequestration of undesirable antibodies in a patient. This document is however silent on oncolysis.

[0050] The biopolymer scaffold used in the present invention may be a mammalian biopolymer such as a human biopolymer, a non-human primate biopolymer, a sheep biopolymer, a pig biopolymer, a dog biopolymer or a rodent biopolymer. In particular the biopolymer scaffold is a protein, especially a (non-modified or non-modified with respect to its amino-acid sequence) plasma protein. Preferably, the biopolymer scaffold is a mammalian protein such as a human protein, a non-human primate protein, a sheep protein, a pig protein, a dog protein or a rodent protein. Typically, the biopolymer scaffold is a non-immunogenic and/or non-toxic protein that preferably circulates in the plasma of healthy (human) individuals and can e.g. be efficiently scavenged or recycled by scavenging receptors, such as e.g. present on myeloid cells or on liver sinusoidal endothelial cells (reviewed by Sorensen et al 2015).

[0051] WO 2020/193486 A1, in particular examples 1-10 thereof, demonstrates that SADC scaffolds as also used in the present invention are suitable for antibody depletion in a more general context.

[0052] According to a particular preference, the biopolymer scaffold is a (preferably human) globulin, preferably selected from the group consisting of immunoglobulins, alpha1-globulins, alpha2-globulins and beta-globulins, in particular immunoglobulin G, haptoglobin and transferrin.

[0053] The biopolymer scaffold may also be (preferably human) albumin, hemopexin, alpha-1-antitrypsin, C1 esterase inhibitor, lactoferrin or non-immunogenic (i.e. non-immunogenic in the individual to be treated) fragments of all of the aforementioned proteins, including the globulins.

[0054] In another preference, the biopolymer scaffold is an anti-CD163 antibody (i.e. an antibody specific for a CD163 protein) or CD163-binding fragment thereof.

[0055] Human CD163 (Cluster of Differentiation 163) is a 130 kDa membrane glycoprotein (formerly called M130) and prototypic class I scavenger receptor with an extracellular portion consisting of nine scavenger receptor cysteine-rich (SRCR) domains that are responsible for ligand binding. CD163 is an endocytic receptor present on macrophages and monocytes, it removes hemoglobin/haptoglobin complexes from the blood but it also plays a role in anti-inflammatory processes and wound healing. Highest expression levels of CD163 are found on tissue macrophages (e.g. Kupffer cells in the liver) and on certain macrophages in spleen and bone marrow. Because of its tissue- and cell-specific expression and entirely unrelated to depletion of undesirable antibodies, CD163 is regarded as a macrophage target for drug delivery of e.g. immunotoxins, liposomes or other therapeutic compound classes (Skytthe et al., 2020).

[0056] Monoclonal anti-CD163 antibodies and the SRCR domains they are binding are for instance disclosed in Madsen et al., 2004, in particular FIG. 7. Further anti-CD163 antibodies and fragments thereof are e.g. disclosed in WO 2002/032941 A2 or WO 2011/039510 A2. At least two structurally different binding sites for ligands were mapped by using domain-specific antibodies such as e.g. monoclonal antibody (mAb) EDhu1 (see Madsen et al, 2004). This antibody binds to the third SRCR of CD163 and competes with hemoglobin/haptoglobin binding to CD163. Numerous other antibodies against different domains of CD163 were previously described in the literature, including Mac2-158, KiM8, GHI/61 and RM3/1, targeting SRCR domains 1, 3, 7 and 9, respectively. In addition, conserved bacterial binding sites were mapped and it was demonstrated that certain antibodies were able to inhibit either bacterial binding but not hemoglobin/haptoglobin complex binding and vice versa. This points to different modes of binding and ligand interactions of CD163 (Fabriek et al, 2009; see also citations therein).

[0057] Entirely unrelated to depletion of undesirable antibodies, CD163 was proposed as a target for cell-specific drug delivery because of its physiological properties. Tumor-associated macrophages represent one of the main targets where the potential benefit of CD163-targeting is currently explored. Remarkably, numerous tumors and malignancies were shown to correlate with CD163 expression levels, supporting the use of this target for tumor therapy. Other proposed applications include CD163 targeting by anti-drug conjugates (ADCs) in chronic inflammation and neuroinflammation (reviewed in Skytthe et al., 2020). Therefore, CD163-targeting by ADCs notably with dexamethasone or stealth liposome conjugates represents therapeutic principle which is currently studied (Graversen et al., 2012; Etzerodt et al., 2012).

[0058] In that context, there are references indicating that anti-CD163 antibodies can be rapidly internalized by endocytosis when applied in vivo. This was shown for example for monoclonal antibody (mAb) Ed-2 (Dijkstra et al., 1985; Graversen et al., 2012) or for mAb Mac2-158/KN2/NRY (Granfeldt et al., 2013). Based on those observations in combination with observations made in the course of the present invention (see in particular example section), anti-CD163 antibodies and CD163-binding turned out to be highly suitable biopolymer scaffolds for depletion/sequestration of undesirable antibodies.

[0059] Numerous anti-CD163 antibodies and CD163-binding fragments thereof are known in the art (see e.g. above). These are suitable to be used as a biopolymer scaffold for the present invention. For instance, any anti-CD163 antibody or fragment thereof mentioned herein or in WO 2011/039510 A2 (which is included herein by reference) may be used as a biopolymer scaffold in the invention. Preferably, the biopolymer scaffold of the inventive compound is antibody Mac2-48, Mac2-158, 5C6-FAT, BerMac3, or E10B10 as disclosed in WO 2011/039510, in particular humanised Mac2-48 or Mac2-158 as disclosed in WO 2011/039510 A2.

[0060] In a preferred embodiment, the anti-CD163 antibody or CD163-binding fragment thereof comprises a heavy-chain variable (V_{H}) region comprising one or more complementarity-determining region (CDR) sequences selected from the group consisting of SEQ ID NOS: 11-13 of WO 2011/039510 A2.

[0061] In addition, or alternatively thereto, in a preferred embodiment, the anti-CD163 antibody or CD163-binding fragment thereof comprises a light-chain variable (V_{L}) region comprising one or more CDR sequences selected from the group consisting of SEQ ID NOs: 14-16 of WO 2011/039510 A2 or selected from the group consisting of SEQ ID NOs: 17-19 of WO 2011/039510 A2.

[0062] In a further preferred embodiment, the anti-CD163 antibody or CD163-binding fragment thereof comprises a heavy-chain variable (V_{H}) region comprising or consisting of the amino acid sequence of SEQ ID NO: 20 of WO 2011/039510 A2.

[0063] In addition, or alternatively thereto, in a preferred embodiment, the anti-CD163 antibody or CD163-binding fragment thereof comprises a light-chain variable (V_{L}) region comprising or consisting of the amino acid sequence of SEQ ID NO: 21 of WO 2011/039510 A2.

[0064] In a further preferred embodiment, the anti-CD163 antibody or CD163-binding fragment thereof comprises a heavy-chain variable (V_{H}) region comprising or consisting of the amino acid sequence of SEQ ID NO: 22 of WO 2011/039510 A2.

[0065] In addition, or alternatively thereto, in a preferred embodiment, the anti-CD163 antibody or CD163-binding fragment thereof comprises a light-chain variable (V_{L}) region comprising or consisting of the amino acid sequence of SEQ ID NO: 23 of WO 2011/039510 A2.

[0066] In a further preferred embodiment, the anti-CD163 antibody or CD163-binding fragment thereof comprises a heavy-chain variable (V_{H}) region comprising or consisting of the amino acid sequence of SEQ ID NO: 24 of WO 2011/039510 A2.

[0067] In addition, or alternatively thereto, in a preferred embodiment, the anti-CD163 antibody or CD163-binding fragment thereof comprises a light-chain variable (V_{L}) region comprising or consisting of the amino acid sequence of SEQ ID NO: 25 of WO 2011/039510 A2.

[0068] In the context of the present invention, the anti-CD163 antibody may be a mammalian antibody such as a humanized or human antibody, a non-human primate antibody, a sheep antibody, a pig antibody, a dog antibody or a rodent antibody. In embodiments, the anti-CD163 antibody may monoclonal.

[0069] According to a preference, the anti-CD163 antibody is selected from IgG, IgA, IgD, IgE and IgM.

[0070] According to a further preference, the CD163-binding fragment is selected from a Fab, a Fab′, a F(ab)2, a Fv, a single-chain antibody, a nanobody and an antigen-binding domain.

[0071] CD163 amino acid sequences are for instance disclosed in WO 2011/039510 A2 (which is included here by reference). In the context of the present invention, the anti-CD163 antibody or CD163-binding fragment thereof is preferably specific for a human CD163, especially with the amino acid sequence of any one of SEQ ID NOS: 28-31 of WO 2011/039510 A2.

[0072] In a further preferred embodiment, the anti-CD163 antibody or CD163-binding fragment thereof is specific for the extracellular region of CD163 (e.g. for human CD163: amino acids 42-1050 of UniProt Q86VB7, sequence version 2), preferably for an SRCR domain of CD163, more preferably for any one of SRCR domains 1-9 of CD163 (e.g. for human CD163: amino acids 51-152, 159-259, 266-366, 373-473, 478-578, 583-683, 719-819, 824-926 and 929-1029, respectively, of UniProt 086VB7, sequence version 2), even more preferably for any one of SRCR domains 1-3 of CD163 (e.g. for human CD163: amino acids 51-152, 159-259, 266-366, and 373-473, respectively, of UniProt Q86VB7, sequence version 2), especially for SRCR domain 1 of CD163 (in particular with the amino acid sequence of any one of SEQ ID NOS: 1-8 of WO 2011/039510 A2, especially SEQ ID NO: 1 of WO 2011/039510 A2).

[0073] In a particular preference, the anti-CD163 antibody or CD163-binding fragment thereof is capable of competing for binding to (preferably human) CD163 with a (preferably human) hemoglobin-haptoglobin complex (e.g. in an ELISA).

[0074] In another particular preference, the anti-CD163 antibody or CD163-binding fragment thereof is capable of competing for binding to human CD163 with any of the anti-human CD163 mAbs disclosed herein, in particular Mac2-48 or Mac2-158 as disclosed in WO 2011/039510 A2.

[0075] In yet another particular preference, the anti-CD163 antibody or CD163-binding fragment thereof is capable of competing for binding to human CD163 with an antibody having a heavy chain variable (V_{H}) region consisting of the amino acid sequence

(SEQ ID NO: 1)
DVQLQESGPGLVKPSQSLSLTCTVTGYSITSDYAWNWIRQFPGNK
LEWMGYITYSGITNYNPSLKSQISITRDTSKNQFFLQLNSVTTED
TATYYCVSGTYYFDYWGQGTTLTVSS,

[0076] and having a light-chain variable (V_{L}) region consisting of the amino acid sequence

(SEQ ID NO: 2)
SVVMTQTPKSLLISIGDRVTITCKASQSVSSDVAWFQQKPGQSPK
PLIYYASNRYTGVPDRFTGSGYGTDFTFTISSVQAEDLAVYFCGQ
DYTSPRTFGGGTKLEIKRA
(e.g. in an ELISA).

[0077] Details on competitive binding experiments are known to the person of skilled in the art (e.g. based on ELISA) and are for instance disclosed in WO 2011/039510 A2 (which is included herein by reference).

[0078] The epitopes of antibodies E10B10 and Mac2-158 as disclosed in WO 2011/039510 were mapped (see example section). These epitopes are particularly suitable for binding of the anti-CD163 antibody (or CD163-binding fragment thereof) of the inventive compound.

[0079] Accordingly, in particularly preferred embodiment, the anti-CD163 antibody or CD163-binding fragment thereof is specific for peptide consisting of 7-25, preferably 8-20, even more preferably 9-15, especially 10-13 amino acids, wherein the peptide comprises the amino acid sequence CSGRVEVKVQEEWGTVCNNGWSMEA (SEQ ID NO; 3) or a 7-24 amino-acid fragment thereof. Preferably, this peptide comprises the amino acid sequence GRVEVKVQEEW (SEQ ID NO: 4), WGTVCNNGWS (SEQ ID NO: 5) or WGTVCNNGW (SEQ ID NO: 6). More preferably, the peptide comprises an amino acid sequence selected from EWGTVCNNGWSME (SEQ ID NO: 7), QEEWGTVCNNGWS (SEQ ID NO: 8), WGTVCNNGWSMEA (SEQ ID NO: 9), EEWGTVCNNGWSM (SEQ ID NO: 10), VQEEWGTVCNNGW (SEQ ID NO: 11), EWGTVCNNGW (SEQ ID NO: 12) and WGTVCNNGWS (SEQ ID NO: 5). Even more preferably, the peptide consists of an amino acid sequence selected from EWGTVCNNGWSME (SEQ ID NO: 7), QEEWGTVCNNGWS (SEQ ID NO: 8), WGTVCNNGWSMEA (SEQ ID NO: 9), EEWGTVCNNGWSM (SEQ ID NO: 10), VQEEWGTVCNNGW (SEQ ID NO: 11), EWGTVCNNGW (SEQ ID NO: 12) and WGTVCNNGWS (SEQ ID NO: 5), optionally with an N-terminal and/or C-terminal cysteine residue.

[0080] Accordingly, in another particularly preferred embodiment, the anti-CD163 antibody or CD163-binding fragment thereof is specific for a peptide consisting of 7-25, preferably 8-20, even more preferably 9-15, especially 10-13 amino acids, wherein the peptide comprises the amino acid sequence DHVSCRGNESALWDCKHDGWG (SEQ ID NO: 13) or a 7-20 amino-acid fragment thereof. Preferably, this peptide comprises the amino acid sequence ESALW (SEQ ID NO: 14) or ALW. More preferably, the peptide comprises an amino acid sequence selected from ESALWDC (SEQ ID NO: 15), RGNESALWDC (SEQ ID NO: 16), SCRGNESALW (SEQ ID NO: 17), VSCRGNESALWDC (SEQ ID NO: 18), ALWDCKHDGW (SEQ ID NO: 19), DHVSCRGNESALW (SEQ ID NO: 20), CRGNESALWD (SEQ ID NO: 21), NESALWDCKHDGW (SEQ ID NO: 22) and ESALWDCKHDGWG (SEQ ID NO: 23). Even more preferably, the peptide consists of an amino acid sequence selected from ESALWDC (SEQ ID NO: 15), RGNESALWDC (SEQ ID NO: 16), SCRGNESALW (SEQ ID NO: 17), VSCRGNESALWDC (SEQ ID NO: 18), ALWDCKHDGW (SEQ ID NO: 19), DHVSCRGNESALW (SEQ ID NO: 20), CRGNESALWD (SEQ ID NO: 21), NESALWDCKHDGW (SEQ ID NO: 22) and ESALWDCKHDGWG (SEQ ID NO: 23), optionally with an N-terminal and/or C-terminal cysteine residue,

[0081] Accordingly, in another particularly preferred embodiment, the anti-CD163 antibody or CD163-binding fragment thereof is specific for a peptide consisting of 7-25, preferably 8-20, even more preferably 9-15, especially 10-13 amino acids, wherein the peptide comprises the amino acid sequence SSLGGTDKELRLVDGENKCS (SEQ ID NO: 24) or a 7-19 amino-acid fragment thereof. Preferably, this peptide comprises the amino acid sequence SSLGGTDKELR (SEQ ID NO: 25) or SSLGG (SEQ ID NO: 26). More preferably, the peptide comprises an amino acid sequence selected from SSLGGTDKELR (SEQ ID NO: 25), SSLGGTDKEL (SEQ ID NO: 27), SSLGGTDKE (SEQ ID NO: 28), SSLGGTDK (SEQ ID NO: 29), SSLGGTD (SEQ ID NO: 30), SSLGGT (SEQ ID NO: 31) and SSLGG (SEQ ID NO: 26). Even more preferably, the peptide consists of an amino acid sequence selected from SSLGGTDKELR (SEQ ID NO: 25), SSLGGTDKEL (SEQ ID NO: 27), SSLGGTDKE (SEQ ID NO: 28), SSLGGTDK (SEQ ID NO: 29), SSLGGTD (SEQ ID NO: 30), SSLGGT (SEQ ID NO: 31) and SSLGG (SEQ ID NO: 26), optionally with an N-terminal and/or C-terminal cysteine residue.

[0082] The peptides (or peptide n-mers) are preferably covalently conjugated (or covalently bound) to the biopolymer scaffold via a (non-immunogenic) linker known in the art such as for example amine-to-sulfhydryl linkers and bifunctional NHS-PEG-maleimide linkers or other linkers known in the art. Alternatively, the peptides (or peptide n-mers) can be bound to the epitope carrier scaffold e.g. by formation of a disulfide bond between the protein and the peptide (which is also referred to as “linker” herein), or using non-covalent assembly techniques, spontaneous isopeptide bond formation or unnatural amino acids for bio-orthogonal chemistry via genetic code expansion techniques (reviewed by Howarth et al 2018 and Lim et al 2016). Covalent and non-covalent bioconjugation strategies suitable for the present invention are also discussed e.g. in Sunasee et al, 2014.

[0083] The compound of the present invention may comprise e.g. at least two, preferably between 3 and 40 copies of one or several different peptides (which may be present in different forms of peptide n-mers as disclosed herein). The compound may comprise one type of epitopic peptide (in other words: antibody-binding peptide or paratope-binding peptide), however the diversity of epitopic peptides bound to one biopolymer scaffold molecule can be a mixture of e.g. up to 8 different epitopic peptides.

[0084] Typically, since the peptides present in the inventive compound specifically bind to selected undesired antibodies, their sequence is usually selected and optimized such that they provide specific binding in order to guarantee selectivity of undesired antibody depletion from the blood. For this purpose, the peptide sequence of the peptides typically corresponds to the entire epitope sequence or portions of the undesired antibody epitope. The peptides used in the present invention can be further optimized by exchanging one, two or up to four amino-acid positions, allowing e.g. for modulating the binding affinity to the undesired antibody that needs to be depleted. Such single or multiple amino-acid substitution strategies that can provide “mimotopes” with increased binding affinity and are known in the field and were previously developed using phage display strategies or peptide microarrays. In other words, the peptides used in the present invention do not have to be completely identical to the native epitope sequences of the undesired antibodies.

[0085] Typically, the peptides used in the compound of the present invention (e.g. peptide P or Pₐ or P_{b}) are composed of one or more of the 20 amino acids commonly present in mammalian proteins. In addition, the amino acid repertoire used in the peptides may be expanded to post-translationally modified amino acids e.g. affecting antigenicity of proteins such as post translational modifications, in particular oxidative post translational modifications (see e.g. Ryan 2014) or modifications to the peptide backbone (see e.g. Müller 2018), or to non-natural amino acids (see e.g. Meister et al 2018). These modifications may also be used in the peptides e.g. to adapt the binding interaction and specificity between the peptide and the variable region of an undesired antibody. In particular, epitopes (and therefore the peptides used in the compound of the present invention) can also contain citrulline as for example in autoimmune diseases. Furthermore, by introducing modifications into the peptide sequence the propensity of binding to an HLA molecule may be reduced, the stability and the physicochemical characteristics may be improved or the affinity to the undesired antibody may be increased.

[0086] In many cases, the undesired antibody that is to be depleted is oligo- or polyclonal (e.g. autoantibodies, ADAs or alloantibodies are typically poly- or oligoclonal), implying that undesired (polyclonal) antibody epitope covers a larger epitopic region of a target molecule. To adapt to this situation, the compound of the present invention may comprise a mixture of two or several epitopic peptides (in other words: antibody-binding peptides or paratope-binding peptides), thereby allowing to adapt to the polyclonality or oligoclonality of an undesired antibody.

[0087] Such poly-epitopic compounds of the present invention can effectively deplete undesired antibodies and are more often effective than mono-epitopic compounds in case the epitope of the undesired antibody extends to larger amino acid sequence stretches.

[0088] It is advantageous if the peptides used for the inventive compound are designed such that they will be specifically recognized by the variable region of the undesired antibodies to be depleted. The sequences of peptides used in the present invention may e.g. be selected by applying fine epitope mapping techniques (i.e. epitope walks, peptide deletion mapping, amino acid substitution scanning using peptide arrays such as described in Carter et al 2004, and Hansen et al 2013) on the undesired antibodies.

[0089] The present invention is suitable for (transiently) depleting antibodies against all oncolytic viruses, such as the ones discussed in Zeng et al. 2021. The oncolytic virus may thus be selected e.g. from any one discussed in Zeng et al., 2021.

[0090] Wild-type AAVs are typically non-pathogenic and only capable of replicating in the presence of helper viruses. One big advantage of this class of viral vectors is that they maintain long term, sustained gene expression in the host cell, making them ideal for oncolytic gene delivery. Numerous natural subtypes have been isolated showing serological differences and unique tropism in vivo and in vitro. AAV vectors are well suited for targeting different cell types. Importantly, they typically do not integrate into the genome of the host cell (Colella et al, 2017).

[0091] AAVs have been extensively studied for oncolytic approaches. For instance, Feiner et al., 2020, discloses tumor targeting by presenting EGFR-binding peptides in the AAV capsid. Kuklik et al., 2021, relates to the development of a bispecific antibody-based platform for retargeting of capsid-modified AAV vectors. Table I of Lundstrom, 2018, contains preclinical examples of anti-neoplastic therapy with oncolytic AAV, among other oncolytic viruses.

[0092] To date, many different serotypes and variants are well studied including AAV2, AAV5 or AAV8. Li (Li et al, 2020) provides an extensive review about AAV vectors. New concepts of improving gene expression, tissue specificity, genome stability, combined with capsid engineering can be found in Domenger (Domenger et al, 2019).

[0093] Much effort was invested into engineering improved AAV capsid variants to change their biological properties including tropism and safety. However, susceptibility to antibody neutralization by preexisting antibodies of the patient remains a major challenge, see e.g. Costa Verdera et al, 2020.

[0094] Kruzik et al, 2019, investigated the prevalence of neutralizing antibodies against various AAV serotypes in different patient cohorts. It was found, for example, that neutralizing antibodies against AAV2 were most abundant at levels up to 74% of the population. Antibodies against AAV8 were found for example in up to 63%. Natural antibodies against AAV5 (up to 59%) and AAV1 (27%) were less abundant. Interestingly, most people tested exhibited antibodies against more than one serotype. A comprehensive review was published by Ronzitti et al, 2020.

[0095] Tseng et al, 2014, reviewed epitopes of anti-AAV antibodies found with human serum and monoclonal antibodies. The interaction between preexisting or induced anti-AAV antibodies and virus capsid proteins has mainly been investigated by mutation analysis, by peptide insertions or by peptide scanning and several approaches were tested to develop AAV variants that improve tropism and that escape humoral immune response. These strategies include directed evolution, structure-based approaches, the engineering of chimeric AAV vectors (for example Bennett et al, 2020) or by displaying peptides of the surface of AAV vectors (Borner et al, 2020). Other proposed strategies to avoid the negative impact of neutralizing antibodies include modifying the route of administration (Mimuro et al, 2013), the discovery of new serotypes and variants (Salganik et al, 2015), the reduction of immunogenicity by PEGylation or polymer technologies (Balakrishnan et al, 2019) or the use of capsid decoys intra-(Mingozzi et al, 2013) or extracorporeally (Bertin et al, 2020). Mechanisms of immunogenicity and their clinical impact were extensively reviewed by Monahan et al, 2021.

[0096] US 2013/0259885 A1 relates to immunomodulation with peptides containing epitopes recognized by CD4+ natural killer T cells. This is taught to be suitable for increasing efficiency of gene therapy. WO 2005/023848 A2 discloses administration of peptides to patients for increasing efficiency of an adenoviral vector.

[0097] WO 2019/018439 A1 relates to the removal of AAV-neutralizing antibodies from a subject by apheresis prior to administering recombinant AAV comprising a heterologous polynucleotide to the subject. Bertin et al, 2020, discloses a similar apheresis approach. Further along similar lines, WO 00/20041 A2 relates to methods of enhancing the effectiveness of therapeutic viral agents by extracorporeal removal of anti-AdV-antibodies with affinity columns based on AdV subunits (i.e. selective apheresis).

[0098] Neutralizing antibodies are not only problematic with respect to AAV-based vectors. To date, Adenovirus (AdV) serotype 5 (Ad5), as the prototypic adenoviral vector, was tested in more than 400 clinical trials. The approved oncolytic virus-based product Gendicine is also based on Ad5 (Zhang et al, 2018). Remarkably, up to 80% of the population carries neutralizing antibodies against Ad5 which has a negative impact on the efficacy.

[0099] Neutralizing antibodies and epitopes against all types of AdV and other viral vectors for therapy were previously described e.g. in Tian et al, 2018; Wang et al, 2019; Fausther-Bovendo et al, 2014; and Mok et al, 2020). As with AAV vectors, much effort was made to circumvent pre-existing anti vector immunity by engineering and fine mapping of epitopes of adenoviral vectors (Roberts et al, 2006).

[0100] According to a preferred embodiment, the oncolytic virus is an AdV vector or an AAV vector, preferably specific for a human host.

[0101] In another preferred embodiment, the oncolytic virus a measles virus, a Herpes simplex virus (HSV), a poxvirus such as Vaccinia virus, a reovirus, a Newcastle disease virus (NVD), a rhabdovirus, a coxsackievirus, a lentivirus, an alphavirus such as Semliki Forest virus, a vesicular stomatitis virus (VSS), a myxoma virus (MYXV), a mengovirus, a bovine viral diarrhea virus (BVDV), a chimeric oncolytic virus, a parvovirus, a picornavirus or a flavivirus; preferably specific for a human host.

[0102] In another preference, the sequence fragment as used herein comprises an epitope or epitope part (e.g. at least six, especially at least seven or even at least eight amino acids) of an AdV protein (preferably a capsid protein sequence, nucleocapsid protein sequence, a structural protein sequence, viral envelope- or receptor-binding-protein sequence, tegument protein sequence, viral enzyme sequence, nuclear matrix protein sequence, DNA- or RNA-binding protein sequence, viral packaging protein sequence or viral polymerase sequence, more preferably a capsid protein sequence, nucleocapsid protein sequence, a structural protein sequence, viral envelope- or receptor-binding-protein sequence, or a tegument protein sequence, in particular a capsid protein sequence) or of an AAV protein (preferably a capsid protein sequence, nucleocapsid protein sequence, a structural protein sequence, viral envelope- or receptor-binding-protein sequence, tegument protein sequence, viral enzyme sequence, nuclear matrix protein sequence, DNA- or RNA-binding protein sequence, viral packaging protein sequence or viral polymerase sequence, more preferably a capsid protein sequence, nucleocapsid protein sequence, a structural protein sequence, viral envelope- or receptor-binding-protein sequence, or a tegument protein sequence, in particular a capsid protein sequence) (see also Examples), in particular wherein the AAV is one of AAV-8, AAV-9, AAV-6, AAV-2 or AAV-5, or of one of the following viral proteins identified by their UniProt accession code:
[0103] A9RAI0, B5SUY7, O41855, O56137, O56139, P03135, P04133, P04882, P08362, P10269, P12538, P69353, Q5Y9B2, Q5Y9B4, Q65311, Q6JC40, Q6VGT5, Q8JQF8, Q8JQG0, Q98654, Q9WBP8, Q9YIJ1,
[0104] or of an AdV hexon protein, an AdV fiber protein, an AdV penton protein, an AdV IIIa protein, an AdV VI protein, an AdV VIII protein or an AdV IX protein or of any one of the capsid proteins identified in FIG. 4 and FIG. 5 or of any one of the capsid proteins listed in Cearley et al., 2008, or of a capsid protein sequence identified by any one of UniProt P03525, P03526, P03527, P03528, P03529, P0CK31, P11078, P11079, P12418, P12419, P15024, P21270, A1Z0P5, O09800, P03170, P04288, P04289, P04291, P04486, P06477, P06484, P06487, P06491, P08314, P08392, P08543, P10185, P10190, P10191, P10192, P10193, P10200, P10202, P10204, P10205, P10210, P10216, P10218, P10219, P10220, P10225, P10227, P10228, P10229, P10231, P10234, P32888, P68333, P08362, P35971, Q89933, P35974, P35976, P69358, P12576, Q9EMA9 and P03522.

[0105] Particularly suitable epitopes for depleting neutralizing antibodies (against AAV and AdV) were found in epitope screens and screens of human sera (see also Examples). Accordingly, in a preferment, the sequence fragment as used herein comprises a sequence of at least 4 or at least 5 or at least 6, preferably at least 7, more preferably at least 8, even more preferably at least 9, yet even more preferably at least 10 consecutive amino acids selected from:
[0106] the group of AdV sequences ETGPPTVPFLTPPF (SEQ ID NO: 32), HDSKLSIATQGPL (SEQ ID NO: 33), LNLRLGQGPLFINSAHNLDINY (SEQ ID NO: 34), VDPMDEPTLLYVLFEVEDVV (SEQ ID NO: 35), MKRARPSEDTENPVYPYD (SEQ ID NO: 36), ISGTVQSAHLIIRFD (SEQ ID NO: 37), LGQGPLFINSAHNLDINYNKGLYLF (SEQ ID NO: 38), SYPFDAQNOLNLRLGQGPLFIN (SEQ ID NO: 39), GDTTPSAYSMSFSWDWSGHNYIN (SEQ ID NO: 40), VLLNNSFLDPEYWNFRN (SEQ ID NO: 41), HNYINEIFATSSYTFSYIA (SEQ ID NO: 42), DEAATALEINLEEEDDDNEDEVDEQAEQQKTH (SEQ ID NO: 43), INLEEEDDDNEDEVDEQAEQ (SEQ ID NO: 44), DNEDEVDEQAEQQKTHVF (SEQ ID NO: 45), EWDEAATALEINLEE (SEQ ID NO: 46), PKVVLYSEDVDIETPDTHISYMP (SEQ ID NO: 47), YIPESYKDRMYSFERNF (SEQ ID NO: 48), DSIGDRTRYFSMW (SEQ ID NO: 49), SYKDRMYSFERNF (SEQ ID NO: 50), and FLVOMLANYNIGYOGFY (SEQ ID NO: 51), or
[0107] the group of AAV sequences WONRDVYLQGPIWAKIP (SEQ ID NO: 52), DNTYFGYSTPWGYFDFNRFHC (SEQ ID NO: 53), MANQAKNWLPGPCY (SEQ ID NO: 54), LPYVLGSAHQGCLPPFP (SEQ ID NO: 55), NGSQAVGRSSFYCLEYF (SEQ ID NO: 56), PLIDQYLYYL (SEQ ID NO: 57), EERFFPSNGILIF (SEQ ID NO: 58), ADGVGSSSGNWHC (SEQ ID NO: 59), SEQ ID NOs: 383-1891 (see Table 1)-preferably group III of Table 1, more preferably group II of Table 1, especially group I of Table 1—and SEQ ID NOs: 1892-2063 (see Table 2)-preferably group I of Table 2—and sequences of group II or III of Table 3 (in particular SEQ ID NOs: 2064-2103), more preferably sequences of group I of Table 3,
[0108] or the group of sequences of Table 4, in particular the group of sequences identified by SEQ ID NOs: 2104-2190,
[0109] or the group of sequences of Table 5.

[0110] It is particularly preferred that Pₐ and/or P_{b} or, independently for each occurrence, P comprises a 6-amino-acid fragment, preferably a 7-amino-acid-fragment, more preferably a 8-amino-acid-fragment, even more preferably a 9-amino-acid fragment, yet even more preferably a 10-amino-acid fragment, especially an entire sequence selected from the group of sequences consisting of GPPTVPFLTP (SEQ ID NO: 60), ETGPPTVPFLTPP (SEQ ID NO: 61), TGPPTVPFLT (SEQ ID NO: 62), PTVPFLTPPF (SEQ ID NO: 63), HDSKLSIATQGPL (SEQ ID NO: 64), SIATOGP (SEQ ID NO: 65), NLRLGOGPLF (SEQ ID NO: 66), QGPLFINSAH (SEQ ID NO: 67), PLFINSAHNLD (SEQ ID NO: 68), LGQGPLF (SEQ ID NO: 69), LNLRLGQGPL (SEQ ID NO: 70), GQGPLFI (SEQ ID NO: 71), NLRLGQGPLFINS (SEQ ID NO: 72), LFINSAHNLDINY (SEQ ID NO: 73), FINSAHNLDI (SEQ ID NO: 74), LRLGQGPLFI (SEQ ID NO: 75), GPLFINSAHN (SEQ ID NO: 76), DEPTLLYVLFEVF (SEQ ID NO: 77), TLLYVLFEVF (SEQ ID NO: 78), DEPTLLYVLF (SEQ ID NO: 79), TLLYVLFEVEDVV (SEQ ID NO: 80), TLLYVLF (SEQ ID NO: 81), MDEPTLLYVLFEV (SEQ ID NO: 82), EPTLLYVLFE (SEQ ID NO: 83), DPMDEPTLLYVLF (SEQ ID NO: 84), LLYVLFEVED (SEQ ID NO: 85), YVLFEVFDVV (SEQ ID NO: 86), PTLLYVLFEV (SEQ ID NO: 87), PTLLYVLFEVFDV (SEQ ID NO: 88), LYVLFEVEDV (SEQ ID NO: 89), EPTLLYVLFEVED (SEQ ID NO: 90), LYVLFEV (SEQ ID NO: 91), PMDEPTLLYVLFE (SEQ ID NO: 92), LLYVLFE (SEQ ID NO: 93), VDPMDEPTLLYVL (SEQ ID NO: 94), YVLFEVF (SEQ ID NO: 95), PTLLYVL (SEQ ID NO: 96), MKRARPSEDTF (SEQ ID NO: 97), KRARPSEDTF (SEQ ID NO: 98), MKRARPSEDT (SEQ ID NO: 99), MKRARPSEDTEN (SEQ ID NO: 100), ARPSEDTENP (SEQ ID NO: 101), RARPSEDTEN (SEQ ID NO: 102), RPSEDTE (SEQ ID NO: 103), MKRARPSEDTENP (SEQ ID NO: 104), RARPSEDTENPVY (SEQ ID NO: 105), ARPSEDT (SEQ ID NO: 106), EDTENPVYPY (SEQ ID NO: 107), RPSEDTENPVYPY (SEQ ID NO: 108), KRARPSEDTENPV (SEQ ID NO: 109), DTFNPVY (SEQ ID NO: 110), RPSEDTENPV (SEQ ID NO: 111), PSEDTFNPVY (SEQ ID NO: 112), DTENPVYPYD (SEQ ID NO: 113), VQSAHLI IRF (SEQ ID NO: 114), AHLIIRF (SEQ ID NO: 115), SGTVQSAHLIIRF (SEQ ID NO: 116), TVQSAHLIIR (SEQ ID NO: 117), HLIIRFD (SEQ ID NO: 118), SAHLIIR (SEQ ID NO: 119), QSAHLIIRED (SEQ ID NO: 120), ISGTVQSAHLIIR (SEQ ID NO: 121), GTVQSAHLII (SEQ ID NO: 122), GTVQSAHLIIRED (SEQ ID NO: 123), QSAHLII (SEQ ID NO: 124), HNLDINY (SEQ ID NO: 125), LFINSAHNLDINY (SEQ ID NO: 126), NLDINYNKGLYLF (SEQ ID NO: 127), FVSPNG (SEQ ID NO: 128), NYINEIF (SEQ ID NO: 129), NKGLYLF (SEQ ID NO: 130), INYNKGLYLF (SEQ ID NO: 131), NSAHNLDINY (SEQ ID NO: 132), WDWSGHNYINEIF (SEQ ID NO: 133), SGHNYINEIF (SEQ ID NO: 134), LGTGLSF (SEQ ID NO: 135), PFLTPPF (SEQ ID NO: 136), LGQGPLF (SEQ ID NO: 137), NLRLGOGPLF (SEQ ID NO: 138), NOLNLRLGQGPLF (SEQ ID NO: 139), GOGPLFI (SEQ ID NO: 140), QLNLRLGQGPLFI (SEQ ID NO: 141), SYPFDAQNOLNLR (SEQ ID NO: 142), YPFDAQNOLNLRL (SEQ ID NO: 143), LRLGQGPLFI (SEQ ID NO: 144), NQLNLRL (SEQ ID NO: 145), FDAQNOLNLR (SEQ ID NO: 146), QNQLNLR (SEQ ID NO: 147), QGPLFIN (SEQ ID NO: 148), PFDAQNQLNLRLG (SEQ ID NO: 149), DAQNQLNLRL (SEQ ID NO: 150), RLGQGPLFIN (SEQ ID NO: 151), QLNLRLG (SEQ ID NO: 152), FDAQNQLNLRLGQ (SEQ ID NO: 153), LNLRLGQGPLFIN (SEQ ID NO: 154), AQNOLNLRLG (SEQ ID NO: 155), AQNOLNL (SEQ ID NO: 156), LNLRLGQ (SEQ ID NO: 157), SYPFDAQNOL (SEQ ID NO: 158), PFDAQNOLNL (SEQ ID NO: 159), YSMSFSW (SEQ ID NO: 160), TPSAYSMSFSWDW (SEQ ID NO: 161), MSFSWDW (SEQ ID NO: 162), PSAYSMSFSW (SEQ ID NO: 163), DTTPSAYSMSFSW (SEQ ID NO: 164), TTPSAYSMSF (SEQ ID NO: 165), YSMSFSWDWS (SEQ ID NO: 166), TGDTTPSAYSMSF (SEQ ID NO: 167), FSWDWSGHNY (SEQ ID NO: 168), SFSWDWS (SEQ ID NO: 169), SAYSMSF (SEQ ID NO: 170), SFSWDWSGHN (SEQ ID NO: 171), SAYSMSFSWD (SEQ ID NO: 172), SMSFSWD (SEQ ID NO: 173), SWDWSGHNYI (SEQ ID NO: 174), AYSMSFS (SEQ ID NO: 175), SMSFSWDWSGHNY (SEQ ID NO: 176), FSWDWSG (SEQ ID NO: 177), SWDWSGH (SEQ ID NO: 178), FLDPEYWNER (SEQ ID NO: 179), SFLDPEYWNF (SEQ ID NO: 180), PEYWNER (SEQ ID NO: 181), LNNSFLDPEYWNF (SEQ ID NO: 182), NNSFLDPEYWNER (SEQ ID NO: 183), FLDPEYW (SEQ ID NO: 184), DPEYWNF (SEQ ID NO: 185), NNSFLDPEYW (SEQ ID NO: 186), VLLNNSFLDPEYW (SEQ ID NO: 187), EYWNFRN (SEQ ID NO: 188), LNNSELDPEY (SEQ ID NO: 189), LDPEYWNERN (SEQ ID NO: 190), LNNSFLD (SEQ ID NO: 191), NSFLDPEYWN (SEQ ID NO: 192), SSYTFSY (SEQ ID NO: 193), FATSSYTFSY (SEQ ID NO: 194), YINEIFATSSYTF (SEQ ID NO: 195), SYTFSYI (SEQ ID NO: 196), ATSSYTF (SEQ ID NO: 197), EIFATSSYTF (SEQ ID NO: 198), NEIFATSSYTESY (SEQ ID NO: 199), ATSSYTFSYI (SEQ ID NO: 200), HNYINEIFATSSY (SEQ ID NO: 201), IFATSSY (SEQ ID NO: 202), INEIFATSSY (SEQ ID NO: 203), NYINEIFATSSYT (SEQ ID NO: 204), YINEIFA (SEQ ID NO: 205), YTESYIA (SEQ ID NO: 206), EIFATSSYTESYI (SEQ ID NO: 207), ALEINLEEEDDDN (SEQ ID NO: 208), ATALEINLEEEDD (SEQ ID NO: 209), EAATALEINLEEE (SEQ ID NO: 210), LEINLEE (SEQ ID NO: 211), TALEINLEEEDDD (SEQ ID NO: 212), EINLEEE (SEQ ID NO: 213), ALEINLEEED (SEQ ID NO: 214), LEINLEEEDD (SEQ ID NO: 215), TALEINLEEE (SEQ ID NO: 216), DEAATALEINLEE (SEQ ID NO: 217), LEINLEEEDDDNE (SEQ ID NO: 218), AATALEINLEEED (SEQ ID NO: 219), EINLEEEDDD (SEQ ID NO: 220), ATALEINLEE (SEQ ID NO: 221), INLEEEDDDN (SEQ ID NO: 222), NLEEEDDDNE (SEQ ID NO: 223), DEVDEQA (SEQ ID NO: 224), EDDDNEDEVDEQA (SEQ ID NO: 225), DDNEDEVDEQAEQ (SEQ ID NO: 226), EVDEQAE (SEQ ID NO: 227), DNEDEVDEQA (SEQ ID NO: 228), VDEQAEQ (SEQ ID NO: 229), EDEVDEQAEQQKT (SEQ ID NO: 230), EDEVDEQAEQ (SEQ ID NO: 231), DEVDEQAEQQKTH (SEQ ID NO: 232), NEDEVDEQAEQOK (SEQ ID NO: 233), DEVDEQAEQQ (SEQ ID NO: 234), EINLEEEDDDNED (SEQ ID NO: 235), NLEEEDDDNEDEV (SEQ ID NO: 236), INLEEED (SEQ ID NO: 237), LEEEDDDNED (SEQ ID NO: 238), INLEEEDDDNEDE (SEQ ID NO: 239), DDDNEDEVDEQAE (SEQ ID NO: 240), LEEEDDDNEDEVD (SEQ ID NO: 241), DDNEDEVDEQ (SEQ ID NO: 242), EDDDNED (SEQ ID NO: 243), NLEEEDD (SEQ ID NO: 244), DDNEDEV (SEQ ID NO: 245), DDDNEDEVDE (SEQ ID NO: 246), DDDNEDE (SEQ ID NO: 247), EEEDDDNEDE (SEQ ID NO: 248), EEDDDNE (SEQ ID NO: 249), EDDDNEDEVD (SEQ ID NO: 250), EDEVDEQ (SEQ ID NO: 251), EEDDDNEDEVDEQ (SEQ ID NO: 252), EEDDDNEDEV (SEQ ID NO: 253), EEEDDDNEDEVDE (SEQ ID NO: 254), EVDEQAEQOK (SEQ ID NO: 255), DNEDEVDEQAEQQ (SEQ ID NO: 256), VDEQAEQQKT (SEQ ID NO: 257), EVDEQAEQQKTHV (SEQ ID NO: 258), VDEQAEQQKTHVF (SEQ ID NO: 259), ALEINLE (SEQ ID NO: 260), WDEAATALEINLE (SEQ ID NO: 261), AATALEINLE (SEQ ID NO: 262), EWDEAATALEINL (SEQ ID NO: 263), EAATALEINL (SEQ ID NO: 264), LYSEDVDIET (SEQ ID NO: 265), LYSEDVDIETPDT (SEQ ID NO: 266), KVVLYSEDVDIET (SEQ ID NO: 267), IETPDTH (SEQ ID NO: 268), VDIETPDTHI (SEQ ID NO: 269), VLYSEDVDIE (SEQ ID NO: 270), DVDIETPDTHISY (SEQ ID NO: 271), VVLYSEDVDIETP (SEQ ID NO: 272), SEDVDIETPDTHI (SEQ ID NO: 273), ETPDTHI (SEQ ID NO: 274), VLYSEDVDIETPD (SEQ ID NO: 275), DVDIETPDTH (SEQ ID NO: 276), DIETPDTHIS (SEQ ID NO: 277), EDVDIETPDTHIS (SEQ ID NO: 278), IETPDTHISY (SEQ ID NO: 279), YSEDVDIETPDTH (SEQ ID NO: 280), VDIETPDTHISYM (SEQ ID NO: 281), PKVVLYSEDVDIE (SEQ ID NO: 282), DIETPDT (SEQ ID NO: 283), DIETPDTHISYMP (SEQ ID NO: 284), EDVDIETPDT (SEQ ID NO: 285), ETPDTHISYM (SEQ ID NO: 286), IETPDTHISYMP (SEQ ID NO: 287), DRMYSFFRNF (SEQ ID NO: 288), DRMYSFF (SEQ ID NO: 289), YSFERNF (SEQ ID NO: 290), IPESYKDRMYSFF (SEQ ID NO: 291), SYKDRMYSFF (SEQ ID NO: 292), ESYKDRMYSF (SEQ ID NO: 293), KDRMYSF (SEQ ID NO: 294), YIPESYKDRMYSF (SEQ ID NO: 295), PESYKDRMYSFFR (SEQ ID NO: 296), YKDRMYSFFR (SEQ ID NO: 297), TRYFSMW (SEQ ID NO: 298), GDRTRYF (SEQ ID NO: 299), DSIGDRTRYF (SEQ ID NO: 300), DSIGDRTRYFSMW (SEQ ID NO: 301), GDRTRYFSMW (SEQ ID NO: 302), DRMYSFFRNF (SEQ ID NO: 303), SYKDRMYSFERNF (SEQ ID NO: 304), NYNIGYQGFY (SEQ ID NO: 305), ANYNIGYQGF (SEQ ID NO: 306), MLANYNIGYOGFY (SEQ ID NO: 307), IGYQGFY (SEQ ID NO: 308), FLVOMLANYNIGY (SEQ ID NO: 309), NIGYQGF (SEQ ID NO: 310) and QMLANYNIGYQGF (SEQ ID NO: 311), optionally wherein at most three, preferably at most two, most preferably at least one amino acid is independently substituted by any other amino acid.

[0111] In another preferred embodiment, Pₐ and/or P_{b} or, independently for each occurrence, P comprises a 6-amino-acid fragment, preferably a 7-amino-acid-fragment, more preferably a 8-amino-acid-fragment, even more preferably a 9-amino-acid fragment, yet even more preferably a 10-amino-acid fragment or even a 11-amino-acid-fragment or yet even a 12-amino-acid-fragment, especially a 13-amino-acid-fragment selected from the group of sequences consisting of SEQ ID NOS: 383-1891 (see Table 1)-preferably group III of Table 1, more preferably group II of Table 1, especially group I of Table 1—and SEQ ID NOs: 1892-2063 (see Table 2)-preferably group I of Table 2—and sequences of group II or III of Table 3 (in particular SEQ ID NOs: 2064-2103), more preferably sequences of group I of Table 3, optionally wherein at most three, preferably at most two, most preferably at least one amino acid is independently substituted by any other amino acid.

[0112] In another preferred embodiment, Pₐ and/or P_{b} or, independently for each occurrence, P comprises a 6-amino-acid fragment, preferably a 7-amino-acid-fragment, more preferably a 8-amino-acid-fragment, even more preferably a 9-amino-acid fragment, yet even more preferably a 10-amino-acid fragment or even a 11-amino-acid-fragment or yet even a 12-amino-acid-fragment, especially a 13-amino-acid-fragment selected from the group of sequences of Table 4, in particular the group of sequences identified by SEQ ID NOS: 2104-2190, optionally wherein at most three, preferably at most two, most preferably at least one amino acid is independently substituted by any other amino acid.

[0113] In another preferred embodiment, Pₐ and/or P_{b} or, independently for each occurrence, P comprises a 6-amino-acid fragment, preferably a 7-amino-acid-fragment, more preferably a 8-amino-acid-fragment, even more preferably a 9-amino-acid fragment, yet even more preferably a 10-amino-acid fragment or even a 11-amino-acid-fragment or yet even a 12-amino-acid-fragment, especially a 13-amino-acid-fragment selected from the group of sequences of Table 5, optionally wherein at most three, preferably at most two, most preferably at least one amino acid is independently substituted by any other amino acid.

[0114] It is further particularly preferred that Pₐ and/or P_{b} or, independently for each occurrence, P comprises a 6-amino-acid fragment, preferably a 7-amino-acid-fragment, more preferably a 8-amino-acid-fragment, even more preferably a 9-amino-acid fragment, yet even more preferably a 10-amino-acid fragment, especially an entire sequence selected from the group of sequences consisting of YLOGPIW (SEQ ID NO: 312), VYLOGPI (SEQ ID NO: 313), WONRDVY (SEQ ID NO: 314), DVYLQGP (SEQ ID NO: 315), QNRDVYL (SEQ ID NO: 316), LOGPIWA (SEQ ID NO: 317), RDVYLOG (SEQ ID NO: 318), NRDVYLO (SEQ ID NO: 319), YFGYSTPWGYFDF (SEQ ID NO: 320), FGYSTPWGYF (SEQ ID NO: 321), GYSTPWGYFD (SEQ ID NO: 322), YSTPWGYFDF (SEQ ID NO: 323), NTYFGYSTPWGYF (SEQ ID NO: 324), TPWGYFDFNRFHC (SEQ ID NO: 325), TYFGYSTPWGYFD (SEQ ID NO: 326), DNTYFGYSTPWGY (SEQ ID NO: 327), YFGYSTPWGY (SEQ ID NO: 328), FGYSTPWGYFDEN (SEQ ID NO: 329), NWLPGPC (SEQ ID NO: 330), WLPGPCY (SEQ ID NO: 331), QAKNWLPGPC (SEQ ID NO: 332), AKNWLPGPCY (SEQ ID NO: 333), MANQAKNWLPGPC (SEQ ID NO: 334), QGCLPPF (SEQ ID NO: 335), GCLPPFP (SEQ ID NO: 336), VLGSAHQGCLPPF (SEQ ID NO: 337), LPYVLGSAHOGCL (SEQ ID NO: 338), YVLGSAHOGC (SEQ ID NO: 339), CLPPFPA (SEQ ID NO: 340), SAHQGCLPPF (SEQ ID NO: 341), VLGSAHQGCL (SEQ ID NO: 342), PYVLGSAHQGCLP (SEQ ID NO: 343), GRSSFYC (SEQ ID NO: 344), AVGRSSFYCLEYF (SEQ ID NO: 345), AVGRSSFYCL (SEQ ID NO: 346), QAVGRSSFYCLEY (SEQ ID NO: 347), NGSQAVGRSSFYC (SEQ ID NO: 348), DOYLYYL (SEQ ID NO: 349), PLIDQYLYYL (SEQ ID NO: 350), IDQYLYY (SEQ ID NO: 351), FFPSNGILIF (SEQ ID NO: 352), EERFFPSNGILIF (SEQ ID NO: 353), VGSSSGNWHC (SEQ ID NO: 354) and ADGVGSSSGNWHC (SEQ ID NO: 355), optionally wherein at most three, preferably at most two, most preferably at least one amino acid is independently substituted by any other amino acid.

[0115] According to a further preference, Pₐ and/or P_{b} or, independently for each occurrence, P consists of a 6-amino-acid fragment, preferably a 7-amino-acid-fragment, more preferably a 8-amino-acid-fragment, even more preferably a 9-amino-acid fragment, yet even more preferably a 10-amino-acid fragment, especially an entire sequence selected from the group of sequences set forth in either of the four paragraphs right above, optionally wherein at most three, preferably at most two, most preferably at least one amino acid is independently substituted by any other amino acid, optionally with an N-terminal and/or C-terminal cysteine residue.

[0116] In the entire context of the present invention, if a peptide, e.g. Pₐ and/or P_{b} or (independently for each occurrence) peptide P, contains a fragment of at least 4 consecutive amino acids selected from a sequence listed in a row of any one of Tables 1-5 (see below in the Examples section), it is preferred that this fragment is extended (N-terminally or C-terminally) such that the peptide actually contains a longer fragment (e.g. at least 6 or at least 7 or at least 8 or at least 9 or at least 10 or at least 11 or at least 12 or 13 amino acids long) of the source protein given in the same row of the table. In other words, it is preferred that the peptide contains a portion of at least 5 or at least 6 or at least 7 or at least 8 or at least 9 or at least 10 or at least 11 or at least 12 or 13 consecutive amino acids of the viral source protein of the fragment sequence (as given in Tables 1-5).

[0117] Further suitable oncolytic viruses (i.e. viruses from which peptide sequences for the present invention may be derived) are disclosed e.g. by Rahman & McFadden 2021, Hromic-Jahjefendic & Lundstrom 2020, and Lawler et al 2017. Therein, lists of oncolytic viruses suitable for the present invention are provided, e.g. DNA viruses such as AdV, Herpes Virus (HSV-1, HSV-2), Parvoviruses (B19PV, H1PV), Poxviruses (VACV, MYXV), Vaccinia Viruses (VACV), as well as RNA viruses such as Alphaviruses (Semiliki Forest virus (SFV), Sindbis virus (SINV), M1), Flavivirus (Zika virus), Paramyxo viruses (Measles virus, Newcastle disease virus (NDV)), Picornaviruses (Coxsackievirus A21, Polio virus, Seneca valley virus (SVV), Reovirus, ECHO-7), Rhabdoviruses (VSV, Maraba virus MG1). Other suitable oncolytic viruses or VLPs are disclosed e.g. in Gao et al., 2021, Jin et al, 2021, Romanenko et al, 2021, Thuenemann et al, 2021, and Kuklik et al., 2021.

[0118] Examples for suitable rheovirus sequences include UniProt P03525, P03526, P03527, P03528, P03529, P0CK31, P11078, P11079, P12418, P12419, P15024, and P21270 (reviewed by Müller et al 2020). In other words, the sequence fragment as used herein may comprise an epitope or epitope part (e.g. at least six, especially at least seven or even at least eight amino acids) of said sequences.

[0119] Examples for suitable HSV-1 sequences include UniProt sequences A1Z0P5, O09800, P03170, P04288, P04289, P04291, P04486, P06477, P06484, P06487, P06491, P08314, P08392, P08543, P10185, P10190, P10191, P10192, P10193, P10200, P10202, P10204, P10205, P10210, P10216, P10218, P10219, P10220, P10225, P10227, P10228, P10229, P10231, P10234, P32888, and P68333. In other words, the sequence fragment as used herein may comprise an epitope or epitope part (e.g. at least six, especially at least seven or even at least eight amino acids) of said sequences.

[0120] Further examples of suitable measles virus sequences include Hemagglutinin H (P08362, P35971), Nucleoprotein N (Q89933), Phosphoprotein P (P35974), Matrix protein M (P35976), Fusion protein F (P69358), Large Protein L (P12576), or unstructured Protein V (Q9EMA9). In other words, the sequence fragment as used herein may comprise an epitope or epitope part (e.g. at least six, especially at least seven or even at least eight amino acids) of said sequences.

[0121] An example of a suitable coxsackievirus sequence is Coxsackievirus group B (CVB3) polyprotein-derived protein sequence (see e.g. Liu & Luo, 2021), UniProt sequence A8UMV1. In other words, the sequence fragment as used herein may comprise an epitope or epitope part (e.g. at least six, especially at least seven or even at least eight amino acids) of said sequence.

[0122] An example of a suitable VSV sequence is VSV Glycoprotein G (UniProt P03522; see review by Munis (Munis et al, 2020). In other words, the sequence fragment as used herein may comprise an epitope or epitope part (e.g. at least six, especially at least seven or even at least eight amino acids) of said sequence.

[0123] Examples of suitable oncolytic poxvirus capsid sequences are disclosed in Torres-Domínguez et al, 2019, and Foloppe et al, 2019. In other words, the sequence fragment as used herein may comprise an epitope or epitope part (e.g. at least six, especially at least seven or even at least eight amino acids) of sequences referenced or disclosed therein.

[0124] Examples of suitable vaccinia proteins from which peptides may be derived are disclosed by Resch et al, 2007, and by Condit et al, 2006. In other words, the sequence fragment as used herein may comprise an epitope or epitope part (e.g. at least six, especially at least seven or even at least eight amino acids) of sequences referenced or disclosed therein.

[0125] It is highly preferred that the peptides used for the inventive compound do not bind to any HLA Class I or HLA Class II molecule (i.e. of the individual to be treated, e.g. human), in order to prevent presentation and stimulation via a T-cell receptor in vivo and thereby induce an immune reaction. It is generally not desired to involve any suppressive (or stimulatory) T-cell reaction in contrast to antigen-specific immunologic tolerization approaches. Therefore, to avoid T-cell epitope activity as much as possible, the peptides of the compound of the present invention (e.g. peptide P or Pₐ or P_{b}) preferably fulfil one or more of the following characteristics:
[0126] To reduce the probability for a peptide used in the compound of the present invention to bind to an HLA Class II or Class I molecule, the peptide (e.g. peptide P or Pₐ or P_{b}) has a preferred length of 4-8 amino acids, although somewhat shorter or longer lengths are still acceptable.
[0127] To further reduce the probability that such a peptide binds to an HLA Class II or Class I molecule, it is preferred to test the candidate peptide sequence by HLA binding prediction algorithms such as NetMHCII-2.3 (reviewed by Jensen et al 2018). Preferably, a peptide (e.g. peptide P or Pₐ or P_{b}) used in the compound of the present invention has (predicted) HLA binding (IC50) of at least 500 nM. More preferably, HLA binding (IC50) is more than 1000 nM, especially more than 2000 nM (cf. e.g. Peters et al 2006). In order to decrease the likelihood of HLA Class I binding, NetMHCpan 4.0 may also be applied for prediction (Jurtz et al 2017).
[0128] To further reduce the probability that such a peptide binds to an HLA Class I molecule, the NetMHCpan Rank percentile threshhold can be set to a background level of 10% according to Koşaloğlu-Yalçin et al, 2018. Preferably, a peptide (e.g. peptide P or Pₐ or P_{b}) used in the compound of the present invention therefore has a % Rank value of more than 3, preferably more than 5, more preferably more than 10 according to the NetMHCpan algorithm.
[0129] To further reduce the probability that such a peptide binds to an HLA Class II molecule, it is beneficial to perform in vitro HLA-binding assays commonly used in the art such as for example refolding assays, iTopia, peptide rescuing assays or array-based peptide binding assays. Alternatively, or in addition thereto, LC-MS based analytics can be used, as e.g. reviewed by Gfeller et al 2016.

[0130] For stronger reduction of the titre of the undesired antibodies, it is preferred that the peptides used in the present invention are circularized (see also Example 2). Accordingly, in a preferred embodiment, at least one occurrence of P is a circularized peptide. Preferably at least 10% of all occurrences of P are circularized peptides, more preferably at least 25% of all occurrences of P are circularized peptides, yet more preferably at least 50% of all occurrences of P are circularized peptides, even more preferably at least 75% of all occurrences of P are circularized peptides, yet even more preferably at least 90% of all occurrences of P are circularized peptides or even at least 95% of all occurrences of P are circularized peptides, especially all of the occurrences of P are circularized peptides. Several common techniques are available for circularization of peptides, see e.g. Ong et al 2017. It goes without saying that “circularized peptide” as used herein shall be understood as the peptide itself being circularized, as e.g. disclosed in Ong et al. (and not e.g. grafted on a circular scaffold with a sequence length that is longer than 13 amino acids). Such peptides may also be referred to as cyclopeptides herein.

[0131] Further, for stronger reduction of the titre of the undesired antibodies relative to the amount of scaffold used, in a preferred embodiment of the compound of the present invention, independently for each of the peptide n-mers, n is at least 2, more preferably at least 3, especially at least 4. Usually, in order to avoid complexities in the manufacturing process, independently for each of the peptide n-mers, n is less than 10, preferably less than 9, more preferably less than 8, even more preferably less than 7, yet even more preferably less than 6, especially less than 5. To benefit from higher avidity through divalent binding of the undesired antibody, it is highly preferred that, for each of the peptide n-mers, n is 2.

[0132] For multivalent binding of the undesired antibodies, it is advantageous that the peptide dimers or n-mers are spaced by a hydrophilic, structurally flexible, immunologically inert, non-toxic and clinically approved spacer such as (hetero-) bifunctional and -trifunctional Polyethylene glycol (PEG) spacers (e.g. NHS-PEG-Maleimide)—a wide range of PEG chains is available and PEG is approved by the FDA. Alternatives to PEG linkers such as immunologically inert and non-toxic synthetic polymers or glycans are also suitable. Accordingly, in the context of the present invention, the spacer (e.g. spacer S) is preferably selected from PEG molecules or glycans. For instance, the spacer such as PEG can be introduced during peptide synthesis. Such spacers (e.g. PEG spacers) may have a molecular weight of e.g. 10000 Dalton. Evidently, within the context of the present invention, the covalent binding of the peptide n-mers to the biopolymer scaffold via a linker each may for example also be achieved by binding of the linker directly to a spacer of the peptide n-mer (instead of, e.g., to a peptide of the peptide n-mer).

[0133] Preferably, each of the peptide n-mers is covalently bound to the biopolymer scaffold, preferably via a linker each.

[0134] As used herein, the linker may e.g. be selected from disulphide bridges and PEG molecules.

[0135] According to a further preferred embodiment of the inventive compound, independently for each occurrence, P is Pₐ or P_{b}.

[0136] Furthermore, it is preferred when in the first peptide n-mer, each occurrence of P is Pₐ and, in the second peptide n-mer, each occurrence of P is P_{b}. Alternatively, or in addition thereto, Pₐ and/or P_{b} is circularized.

[0137] Divalent binding is particularly suitable to reduce antibody titres. According, in a preferred embodiment,
[0138] the first peptide n-mer is Pₐ—S—Pₐ and the second peptide n-mer is Pₐ—S—Pₐ;
[0139] the first peptide n-mer is Pₐ—S—Pₐ and the second peptide n-mer is P_{b}—S—P_{b};
[0140] the first peptide n-mer is P_{b}—S—P_{b} and the second peptide n-mer is P_{b}—S—P_{b};
[0141] the first peptide n-mer is Pₐ—S—P_{b} and the second peptide n-mer is Pₐ—S—P_{b};
[0142] the first peptide n-mer is Pₐ—S—P_{b} and the second peptide n-mer is Pₐ—S—Pₐ; or
[0143] the first peptide n-mer is Pₐ—S—P_{b} and the second peptide n-mer is P_{b}—S—P_{b}.

[0144] For increasing effectivity, in a preferred embodiment the first peptide n-mer is different from the second peptide n-mer. For similar reasons, preferably, the peptide Pₐ is different from the peptide P_{b}, preferably wherein the peptide Pₐ and the peptide P_{b} are two different epitopes of the same antigen or two different epitope parts of the same epitope.

[0145] Especially for better targeting of polyclonal antibodies, it is advantageous when the peptide Pₐ and the peptide P_{b} comprise the same amino-acid sequence fragment, wherein the amino-acid sequence fragment has a length of at least 2 amino acids, preferably at least 3 amino acids, more preferably at least 4 amino acids, yet more preferably at least 5 amino acids, even more preferably at least 6 amino acids, yet even more preferably at least 7 amino acids, especially at least 8 amino acids or even at least 9 amino acids.

[0146] Further, for stronger reduction of the titre of the undesired antibodies relative to the amount of scaffold used, the compound comprises a plurality of said first peptide n-mer (e.g. up to 10 or 20 or 30) and/or a plurality of said second peptide n-mer (e.g. up to 10 or 20 or 30).

[0147] As also illustrated above, it is highly preferred when the compound of the present invention is non-immunogenic in a mammal, preferably in a human, in a non-human primate, in a sheep, in a pig, in a dog or in a rodent.

[0148] In the context of the present invention, a non-immunogenic compound preferably is a compound wherein the biopolymer scaffold (if it is a protein) and/or the peptides (of the peptide n-mers) have an IC50 higher than 100 nM, preferably higher than 500 nM, even more preferably higher than 1000 nM, especially higher than 2000 nM, against HLA-DRB1_0101 as predicted by the NetMHCII-2.3 algorithm. The NetMHCII-2.3 algorithm is described in detail in Jensen et al, which is incorporated herein by reference. The algorithm is publicly available under http://www.cbs.dtu.dk/services/NetMHCII-2.3/. Even more preferably, a non-immunogenic compound (or pharmaceutical composition) does not bind to any HLA and/or MHC molecule (e.g. in a mammal, preferably in a human, in a non-human primate, in a sheep, in a pig, in a dog or in a rodent; or of the individual to be treated) in vivo.

[0149] According to a further preference, the compound is for (transient) intracorporeal sequestration (or (transient) intracorporeal depletion) of at least one antibody (against the oncolytic virus or neutralizing the oncolytic virus) in an individual, preferably in the bloodstream of the individual and/or for (transient) reduction of the titre of at least one antibody (against the oncolytic virus or neutralizing the oncolytic virus) in the individual, preferably in the bloodstream of the individual.

[0150] In another preferred embodiment, the entire sequence, optionally with the exception of an N-terminal and/or C-terminal cysteine, of at least one occurrence of P, preferably of at least 10% of all occurrences of P, more preferably of at least 25% of all occurrences of P, yet more preferably of at least 50% of all occurrences of P, even more preferably of at least 75% of all occurrences of P, yet even more preferably of at least 90% of all occurrences of P or even of at least 95% of all occurrences of P, especially of all of the occurrences of P, is identical to a sequence fragment of a protein, wherein the protein is identified by one of the UniProt accession codes disclosed herein; optionally wherein the sequence fragment comprises at most five, preferably at most four, more preferably at most three, even more preferably at most two, especially at most one amino acid substitutions (e.g. for the purposes mentioned above, such as creating mimotopes).

[0151] In another preferred embodiment, the entire sequence, optionally with the exception of an N-terminal and/or C-terminal cysteine, of peptide Pₐ is identical to a sequence fragment of a protein, wherein the protein is identified by one of the UniProt accession codes disclosed herein; optionally wherein said sequence fragment comprises at most five, preferably at most four, more preferably at most three, even more preferably at most two, especially at most one amino acid substitutions (e.g. for the purposes mentioned above, such as creating mimotopes).

[0152] In another preferred embodiment, the entire sequence, optionally with the exception of an N-terminal and/or C-terminal cysteine, of peptide P_{b} is identical to a sequence fragment of a protein, wherein the protein is identified by one of the UniProt accession codes disclosed herein; optionally wherein said sequence fragment comprises at most five, preferably at most four, more preferably at most three, even more preferably at most two, especially at most one amino acid substitutions (e.g. for the purposes mentioned above, such as creating mimotopes).

[0153] In another preferred embodiment, the entire sequence, optionally with the exception of an N-terminal and/or C-terminal cysteine, of peptide Pₐ is identical to a sequence fragment of a protein and the entire sequence, optionally with the exception of an N-terminal and/or C-terminal cysteine, of peptide P_{b} is identical to the same or another, preferably another, sequence fragment of the same protein, wherein the protein is identified by one of the UniProt accession codes listed herein; optionally wherein said sequence fragment and/or said another sequence fragment comprises at most five, preferably at most four, more preferably at most three, even more preferably at most two, especially at most one amino acid substitutions (e.g. for the purposes mentioned above, such as creating mimotopes).

[0154] In an aspect, the present invention relates to a pharmaceutical composition comprising the inventive and at least one pharmaceutically acceptable excipient.

[0155] In embodiments, the composition is prepared for intraperitoneal, subcutaneous, intramuscular and/or intravenous administration. In particular, the composition is for repeated administration (since it is typically non-immunogenic).

[0156] In a preference, the molar ratio of peptide P or Pₐ or P_{b} to biopolymer scaffold in the composition is from 2:1 to 100:1, preferably from 3:1 to 90:1, more preferably from 4:1 to 80:1, even more preferably from 5:1 to 70:1, yet even more preferably from 6:1 to 60:1, especially from 7:1 to 50:1 or even from 8:10 to 40:1.

[0157] In another aspect, the compound of the present invention is for use in therapy, preferably therapy of a neoplasm such as a benign neoplasm, an in situ neoplasm or an malignant neoplasm, especially therapy of a solid tumor or a hematological malignancy. The malignant neoplasm may be any solid tumor, in particular selected from the group of (metastatic) tumors such as brain cancers (e.g. glioma, glioblastoma, cerebellar brain tumors, as reviewed by de Sostoa et al, 2020), breast cancers, colon- and colorectal cancers, esophageal cancers, prostate cancers, bladder cancer, kidney cancers, endometrial cancers, thyroid cancers, gastric cancers, liver cancers, lung cancers, uterine cancers, tracheal cancers, testicular cancers, cervical cancers, head and neck cancers, skin cancers, bone cancers, pancreatic cancers and ovarian cancers. Alternatively, the malignant neoplasm may be a hematological malignancy, in particular selected from the group of leukemias, lymphomas and multiple myelomas such as listed in the reviews by Innao et al, 2020, and Yang et al, 2021. Throughout the entire context of the present invention, the solid tumor may be metastatic. Typically, the solid tumor is malignant.

[0158] The individual to be treated (who is preferably human) typically has a neoplasm such as a benign neoplasm, an in situ neoplasm or a malignant neoplasm. The malignant neoplasm may be any solid tumor, in particular as defined in the paragraph above. Alternatively, the malignant neoplasm may be a hematological malignancy, in particular as defined in the paragraph above.

[0159] In the course of the present invention, it turned out that the inventive compound provides a highly suitable transient therapeutic window for oncolytic virus administration (see e.g. Example 1 and FIGS. 1 and 2). According to a particular preference, the administration of the compound (or the pharmaceutical composition comprising the compound) is followed by (systemic or local, especially systemic) administration of the oncolytic virus or oncolytic VLP (based on the oncolytic virus) within 96 hours, preferably within 72 hours or even within 60 hours, more preferably within 48 hours, even more preferably within 36 hours, yet even more preferably within 24 hours, especially within 12 hours; preferably wherein the (systemic or local, especially systemic) administration of the oncolytic virus or oncolytic VLP occurs at least 6 hours, preferably at least 12 hours, more preferably at least 24 hours after administration of the pharmaceutical composition. Put differently, the window for (systemic or local, especially systemic) administration of the oncolytic virus or oncolytic VLP is preferably 0-96 hours, more preferably 6-72 hours, even more preferably 12-60 hours, yet even more preferably 24-48 hours post administration of the compound (or the pharmaceutical composition comprising the compound).

[0160] In the course of the present invention, it furthermore turned out that the in vivo kinetics of undesirable-antibody lowering by the inventive compound is typically very fast, sometimes followed by a mild rebound of the undesirable antibody. It is thus particularly preferred when the compound (or the pharmaceutical composition comprising the compound) is administered at least twice within a 96-hour window, preferably within a 72-hour window, more preferably within a 48-hour window, even more preferably within a 36-hour window, yet even more preferably within a 24-hour window, especially within a 18-hour window or even within a 12-hour window; in particular wherein this window is followed by administration of the anti-neoplastic composition as described herein within 96 hours, preferably within 72 hours or even within 60 hours, more preferably within 48 hours, even more preferably within 36 hours, yet even more preferably within 24 hours, especially within 12 hours; preferably wherein the (systemic or local, especially systemic) administration of the oncolytic virus or oncolytic VLP occurs at least 6 hours, preferably at least 12 hours, more preferably at least 24 hours after administration of the pharmaceutical composition. For instance, the pharmaceutical composition may be administered at −24 hrs and −12 hrs before (systemic or local, especially systemic) administration of the anti-neoplastic composition (oncolytic virus or oncolytic VLP based thereon) at 0 hrs.

[0161] According to a particular preference, the compound of the present invention is for use in increasing efficacy of an oncolytic virus or oncolytic VLP based on the oncolytic virus (as defined herein) in an individual, preferably wherein the pharmaceutical composition is administered to the individual prior to or concurrently with (systemic or local, especially systemic) administration of the oncolytic virus or oncolytic VLP based on the oncolytic virus. Alternatively, or in addition thereto, the titer of an antibody specific for the oncolytic virus or oncolytic VLP (and preferably also for the compound) is preferably determined after administration of the pharmaceutical composition and prior to administration of the virus or VLP, especially wherein the virus or VLP is only administered if the titer is below a threshold. Otherwise, administration of the composition may be repeated to further lower the titer.

[0162] In embodiments, one or more antibodies are present in the individual which are specific for at least one occurrence of peptide P, or for peptide Pₐ and/or peptide P_{b}, preferably wherein said antibodies are neutralizing antibodies for said oncolytic virus.

[0163] It is highly preferred that the composition is non-immunogenic in the individual (e.g. it does not comprise an adjuvant or an immunostimulatory substance that stimulates the innate or the adaptive immune system, e.g. such as an adjuvant or a T-cell epitope).

[0164] The composition of the present invention may be administered at a dose of 1-1000 mg, preferably 2-500 mg, more preferably 3-250 mg, even more preferably 4-100 mg, especially 5-50 mg, compound per kg body weight of the individual, preferably wherein the composition is administered repeatedly. Such administration may be intraperitoneally, subcutaneously, intramuscularly or intravenously or systemically or locally.

[0165] In an aspect, the present invention relates to a method of (transiently) sequestering (or depleting) one or more antibodies (preferably wherein said antibodies are neutralizing antibodies for said oncolytic virus) present in an individual, comprising
[0166] obtaining a pharmaceutical composition as defined herein, wherein the composition is non-immunogenic in the individual and wherein the one or more antibodies present in the individual are specific for at least one occurrence of P, or for peptide Pₐ and/or peptide P_{b}; and
[0167] administering (in particular repeatedly administering, e.g. at least two times, preferably at least three times, more preferably at least five times) the pharmaceutical composition to the individual.

[0168] In the context of the present invention, the individual (to be treated) may be a human or non-human animal, preferably a non-human primate, a sheep, a pig, a dog or a rodent, in particular a mouse.

[0169] Preferably, the biopolymer scaffold is autologous with respect to the individual, preferably wherein the biopolymer scaffold is an autologous protein (i.e. murine albumin is used when the individual is a mouse).

[0170] In yet another aspect, the present invention relates to a pharmaceutical composition (i.e. an anti-neoplasticcomposition), comprising the compound defined herein and further comprising the oncolytic virus and optionally at least one pharmaceutically acceptable excipient. The oncolytic virus typically comprises a peptide fragment with a sequence length of at least six, preferably at least seven, more preferably at least eight, especially at least 9 amino acids. The sequence of at least one occurrence of peptide P, or peptide Pₐ and/or peptide P_{b}, of the compound is at least 70% identical, preferably at least 75% identical, more preferably at least 80% identical, yet more preferably at least 85% identical, even more preferably at least 90% identical, yet even more preferably at least 95% identical, especially completely identical to the sequence of said peptide fragment. Preferably, this pharmaceutical composition is for use in therapy of a neoplasm and/or for use in prevention or inhibition of an undesirable immune reaction against the oncolytic virus.

[0171] This composition is furthermore preferably non-immunogenic in the individual.

[0172] In even yet another aspect, the present invention provides a method of inhibiting a (undesirable)-especially humoral-immune reaction to a treatment with a anti-neoplastic composition in an individual in need of treatment with the anti-neoplastic composition as defined above or of inhibiting neutralization of an oncolytic virus in a anti-neoplastic composition as defined above for an individual in need of treatment with the anti-neoplastic composition, comprising obtaining said anti-neoplastic composition; wherein the compound of the anti-neoplastic composition is non-immunogenic in the individual, and administering (preferably repeatedly administering) the anti-neoplastic composition to the individual (preferably systemically or locally).

[0173] In general, screening for peptide mimotopes per se is known in the art, see for instance Shanmugam et al. Mimotope-based compounds of the invention have the following two advantages over compounds based on wild-type epitopes: First, the undesired antibodies, as a rule, have even higher affinities for mimotopes found by screening a peptide library, leading to higher clearance efficiency of the mimotope-based compound. Second, mimotopes further enable avoiding T-cell epitope activity as much as possible (as described hereinabove) in case the wild-type epitope sequence induces such T-cell epitope activity.

[0174] In a further aspect, the present invention relates to a peptide, wherein the peptide is defined as disclosed herein for any one of the at least two peptides of the inventive compound, P, Pₐ, or P_{b}.

[0175] In certain embodiments, such peptides may be used as probes for the diagnostic typing and analysis of circulating oncolytic virus-neutralizing antibodies. The peptides can e.g. be used as part of a diagnostic vector-neutralizing antibody typing or screening device or kit or procedure, as a companion diagnostic, for patient stratification or for monitoring vector-neutralizing antibody levels prior to, during and/or after anti-neoplastic therapy (with the oncolytic virus).

[0176] In a further aspect, the invention relates to a method for detecting and/or quantifying oncolytic virus-neutralizing antibodies in a biological sample comprising the steps of
[0177] bringing the sample into contact with the peptide defined as disclosed herein (e.g. for P, Pₐ, or P_{b}) or the compound as disclosed herein, and
[0178] detecting the presence and/or concentration of antibodies in the sample.

[0179] The skilled person is familiar with methods for detecting and/or quantifying antibodies in biological samples. The method can e.g. be a sandwich assay, preferably an enzyme-linked immunosorbent assay (ELISA), or a surface plasmon resonance (SPR) assay.

[0180] In a preference, the peptide (especially at least 10, more preferably at least 100, even more preferably at least 1000, especially at least 10000 different peptides of the invention) or the compound is immobilized on a solid support, preferably an ELISA plate or an SPR chip or a biosensor-based diagnostic device with an electrochemical, fluorescent, magnetic, electronic, gravimetric or optical biotransducer. Alternatively, or in addition thereto, the peptide (especially at least 10, more preferably at least 100, even more preferably at least 1000, especially at least 10000 different peptides of the invention) or the compound may be coupled to a reporter or reporter fragment, such as a reporter fragment suitable for a protein-fragment complementation assay (PCA); see e.g. Li et al, 2019, or Kainulainen et al, 2021.

[0181] Preferably, the sample is obtained from a mammal, preferably a human. Preferably the sample is a blood sample, preferably a whole blood, serum, or plasma sample.

[0182] According to a preferred embodiment, the mammal (human) has a neoplasm, more preferably wherein the neoplasm is a benign neoplasm, an in situ neoplasm or a malignant neoplasm, even more preferably a solid tumor or a hematological malignancy, especially wherein the mammal has a solid tumor preferably selected from the group of brain cancers, breast cancers, colon cancers, esophageal cancers, prostate cancers, bladder cancer, kidney cancers, endometrial cancers, thyroid cancers, gastric cancers, liver cancers, lung cancers, pancreatic cancers, uterine cancers, tracheal cancers, testicular cancers, cervical cancers, head and neck cancers, skin cancers, bone cancers, pancreatic cancers and ovarian cancers, or a hematological malignancy preferably selected from the group of leukemias, lymphomas and multiple myelomas; in particular wherein the mammal (human) has been selected to undergo therapy with an oncolytic virus or oncolytic VLP or is undergoing therapy with an oncolytic virus or oncolytic VLP.

[0183] The invention further relates to the use of a peptide defined as disclosed herein (e.g. for P, Pₐ, or P_{b}) or the compound as disclosed herein in a diagnostic assay, preferably ELISA, preferably as disclosed herein above.

[0184] A further aspect of the invention relates to a diagnostic device comprising the peptide defined as disclosed herein (e.g. for P, Pₐ, or P_{b}) or the compound as disclosed herein, preferably immobilized on a solid support. In a preference, the solid support is an ELISA plate or a surface plasmon resonance chip. In another preference, the diagnostic device is a biosensor-based diagnostic device with an electrochemical, fluorescent, magnetic, electronic, gravimetric or optical biotransducer.

[0185] In another preferred embodiment, the diagnostic device is a lateral flow assay.

[0186] The invention further relates to a diagnostic kit comprising a peptide defined as disclosed herein (e.g. for P, Pₐ, or P_{b}) or the compound as disclosed herein, preferably a diagnostic device as defined herein. Preferably the diagnostic kit further comprises one or more selected from the group of a buffer, a reagent, instructions. Preferably the diagnostic kit is an ELISA kit.

[0187] A further aspect relates to an apheresis device comprising the peptide defined as disclosed herein (e.g. for P, Pₐ, or P_{b}). Preferably the peptide is immobilized on a solid carrier. It is especially preferred if the apheresis device comprises at least two, preferably at least three, more preferably at least four different peptides defined as disclosed herein (e.g. for P, Pₐ, or P_{b}). In a preferred embodiment the solid carrier comprises the inventive compound.

[0188] Preferably, the solid carrier is capable of being contacted with blood or plasma flow. Preferably, the solid carrier is a sterile and pyrogen-free column.

[0189] In the context of the present invention, for improved bioavailability, it is preferred that the inventive compound has a solubility in water at 25° C. of at least 0.1 μg/ml, preferably at least 1 μg/ml, more preferably at least 10 μg/ml, even more preferably at least 100 μg/ml, especially at least 1000 μg/ml.

[0190] The term “preventing” or “prevention” as used herein means to stop a disease state or condition from occurring in a patient or subject completely or almost completely or at least to a (preferably significant) extent, especially when the patient or subject or individual is predisposed to such a risk of contracting a disease state or condition.

[0191] The pharmaceutical composition of the present invention is preferably provided as a (typically aqueous) solution, (typically aqueous) suspension or (typically aqueous) emulsion. Excipients suitable for the pharmaceutical composition of the present invention are known to the person skilled in the art, upon having read the present specification, for example water (especially water for injection), saline, Ringer's solution, dextrose solution, buffers, Hank solution, vesicle forming compounds (e.g. lipids), fixed oils, ethyl oleate, 5% dextrose in saline, substances that enhance isotonicity and chemical stability, buffers and preservatives. Other suitable excipients include any compound that does not itself induce the production of antibodies in the patient (or individual) that are harmful for the patient (or individual). Examples are well tolerable proteins, polysaccharides, polylactic acids, polyglycolic acid, polymeric amino acids and amino acid copolymers. This pharmaceutical composition can (as a drug) be administered via appropriate procedures known to the skilled person (upon having read the present specification) to a patient or individual in need thereof (i.e. a patient or individual having or having the risk of developing the diseases or conditions mentioned herein). The preferred route of administration of said pharmaceutical composition is parenteral administration, in particular through intraperitoneal, subcutaneous, intramuscular and/or intravenous administration. For parenteral administration, the pharmaceutical composition of the present invention is preferably provided in injectable dosage unit form, e.g. as a solution (typically as an aqueous solution), suspension or emulsion, formulated in conjunction with the above-defined pharmaceutically acceptable excipients. The dosage and method of administration, however, depends on the individual patient or individual to be treated. Said pharmaceutical composition can be administered in any suitable dosage known from other biological dosage regimens or specifically evaluated and optimised for a given individual. For example, the active agent may be present in the pharmaceutical composition in an amount from 1 mg to 10 g, preferably 50 mg to 2 g, in particular 100 mg to 1 g. Usual dosages can also be determined on the basis of kg body weight of the patient, for example preferred dosages are in the range of 0.1 mg to 100 mg/kg body weight, especially 1 to 10 mg/kg body weight (per administration session). The administration may occur e.g. once daily, once every other day, once per week or once every two weeks. As the preferred mode of administration of the inventive pharmaceutical composition is parenteral administration, the pharmaceutical composition according to the present invention is preferably liquid or ready to be dissolved in liquid such sterile, de-ionised or distilled water or sterile isotonic phosphate-buffered saline (PBS). Preferably, 1000 μg (dry-weight) of such a composition comprises or consists of 0.1-990 μg, preferably 1-900 μg, more preferably 10-200 μg compound, and option-ally 1-500 μg, preferably 1-100 μg, more preferably 5-15 μg (buffer) salts (preferably to yield an isotonic buffer in the final volume), and optionally 0.1-999.9 μg, preferably 100-999.9 μg, more preferably 200-999 μg other excipients. Preferably, 100 mg of such a dry composition is dissolved in sterile, de-ionised/distilled water or sterile isotonic phosphate-buffered saline (PBS) to yield a final volume of 0.1-100 ml, preferably 0.5-20 ml, more preferably 1-10 ml.

[0192] It is evident to the skilled person that active agents and drugs described herein can also be administered in salt-form (i.e. as a pharmaceutically acceptable salt of the active agent). Accordingly, any mention of an active agent herein shall also include any pharmaceutically acceptable salt forms thereof.

[0193] Methods for chemical synthesis of peptides used for the compound of the present invention are well-known in the art. Of course, it is also possible to produce the peptides using recombinant methods. The peptides can be produced in microorganisms such as bacteria, yeast or fungi, in eukaryotic cells such as mammalian or insect cells, or in a recombinant virus vector such as adenovirus, poxvirus, herpesvirus, Simliki forest virus, baculovirus, bacteriophage, sindbis virus or sendai virus. Suitable bacteria for producing the peptides include E. coli, B. subtilis or any other bacterium that is capable of expressing such peptides. Suitable yeast cells for expressing the peptides of the present invention include Saccharomyces cerevisiae, Schizosaccharomyces pombe, Candida, Pichiapastoris or any other yeast capable of expressing peptides. Corresponding means and methods are well known in the art. Also, methods for isolating and purifying recombinantly produced peptides are well known in the art and include e.g. gel filtration, affinity chromatography, ion exchange chromatography etc.

[0194] Beneficially, cysteine residues are added to the peptides at the N- and/or C-terminus to facilitate coupling to the biopolymer scaffold, especially.

[0195] To facilitate isolation of said peptides, fusion polypeptides may be made wherein the peptides are translationally fused (covalently linked) to a heterologous polypeptide which enables isolation by affinity chromatography. Typical heterologous polypeptides are His-Tag (e.g. His6; 6 histidine residues), GST-Tag (Glutathione-S-transferase) etc. The fusion polypeptide facilitates not only the purification of the peptides but can also prevent the degradation of the peptides during the purification steps. If it is desired to remove the heterologous polypeptide after purification, the fusion polypeptide may comprise a cleavage site at the junction between the peptide and the heterologous polypeptide. The cleavage site may consist of an amino acid sequence that is cleaved with an enzyme specific for the amino acid sequence at the site (e.g. proteases).

[0196] The coupling/conjugation chemistry used to link the peptides/peptide n-mers to the biopolymer scaffold (e.g. via heterobifunctional compounds such as GMBS and of course also others as described in “Bioconjugate Techniques”, Greg T. Hermanson) or used to conjugate the spacer to the peptides in the context of the present invention can also be selected from reactions known to the skilled in the art. The biopolymer scaffold itself may be recombinantly produced or obtained from natural sources.

[0197] Herein, the term “specific for”—as in “molecule A specific for molecule B”—means that molecule A has a binding preference for molecule B compared to other molecules in an individual's body. Typically, this entails that molecule A (such as an antibody) has a dissociation constant (also called “affinity”) in regard to molecule B (such as the antigen, specifically the binding epitope thereof) that is lower than (i.e. “stronger than”) 1000 nM, preferably lower than 100 nM, more preferably lower than 50 nM, even more preferably lower than 10 nM, especially lower than 5 nM.

[0198] Herein, “UniProt” refers to the Universal Protein Resource. UniProt is a comprehensive resource for protein sequence and annotation data. UniProt is a collaboration between the European Bioinformatics Institute (EMBL-EBI), the SIB Swiss Institute of Bioinformatics and the Protein Information Resource (PIR). Across the three institutes more than 100 people are involved through different tasks such as database curation, software development and support. Website: http://www.uniprot.org/

[0199] Entries in the UniProt databases are identified by their accession codes (referred to herein e.g. as “UniProt accession code” or briefly as “UniProt” followed by the accession code), usually a code of six alphanumeric letters (e.g. “Q1HVF7”). If not specified otherwise, the accession codes used herein refer to entries in the Protein Knowledgebase (UniProtKB) of UniProt. If not stated otherwise, the UniProt database state for all entries referenced herein is of 23 Feb. 2022 (UniProt/UniProtKB Release 2022_01).

[0200] In the context of the present application, sequence variants (designated as “natural variant” in UniProt) are expressly included when referring to a UniProt database entry.

[0201] “Percent (%) amino acid sequence identity” or “X % identical” (such as “70% identical”) with respect to a reference polypeptide or protein sequence is defined as the percentage of amino acid residues in a candidate sequence that are identical with the amino acid residues in the reference polypeptide sequence, after aligning the sequences and introducing gaps, if necessary, to achieve the maximum percent sequence identity, and not considering any conservative substitutions as part of the sequence identity. Alignment for purposes of determining percent amino acid sequence identity can be achieved in various ways that are within the skill in the art, for instance, using publicly available computer software such as BLAST, BLAST-2, ALIGN, ALIGN-2, Megalign (DNASTAR) or the “needle” pairwise sequence alignment application of the EMBOSS software package. Those skilled in the art can determine appropriate parameters for aligning sequences, including any algorithms needed to achieve maximal alignment over the full length of the sequences being compared. For purposes herein, however, % amino acid sequence identity values are calculated using the sequence alignment of the computer programme “needle” of the EMBOSS software package (publicly available from European Molecular Biology Laboratory; Rice et al., 2000).

[0202] The needle programme can be accessed under the web site http://www.ebi.ac.uk/Tools/psa/emboss_needle/ or downloaded for local installation as part of the EMBOSS package from http://emboss.sourceforge.net/. It runs on many widely-used UNIX operating systems, such as Linux.

[0203] To align two protein sequences, the needle programme is preferably run with the following parameters:

[0204] Commandline: needle-auto-stdout-asequence SEQUENCE_FILE_A -bsequence SEQUENCE_FILE_B-datafile EBLOSUM62-gapopen 10.0-gapextend 0.5-endopen 10.0-endextend 0.5-aformat3 pair-sprotein1-sprotein2 (Align format: pair Report file: stdout)

[0205] The % amino acid sequence identity of a given amino acid sequence A to, with, or against a given amino acid sequence B (which can alternatively be phrased as a given amino acid sequence A that has or comprises a certain % amino acid sequence identity to, with, or against a given amino acid sequence B) is calculated as follows:
[0206] 100 times the fraction X/Y
[0207] where X is the number of amino acid residues scored as identical matches by the sequence alignment program needle in that program's alignment of A and B, and where Y is the total number of amino acid residues in B. It will be appreciated that where the length of amino acid sequence A is not equal to the length of amino acid sequence B, the % amino acid sequence identity of A to B will not equal the % amino acid sequence identity of B to A. In cases where “the sequence of A is more than No identical to the entire sequence of B”, Y is the entire sequence length of B (i.e. the entire number of amino acid residues in B). Unless specifically stated otherwise, all % amino acid sequence identity values used herein are obtained as described in the immediately preceding paragraph using the needle computer program.

[0208] The present invention further relates to the following embodiments:

[0209] Embodiment 1. A compound comprising
[0210] a biopolymer scaffold and at least
[0211] a first peptide n-mer of the general formula:

P(—S—P)₍ₙ₋₁₎ and
[0212] a second peptide n-mer of the general formula:

P(—S—P)₍ₙ₋₁₎;
[0213] wherein, independently for each occurrence, P is a peptide with a sequence length of 6-13 amino acids, and S is a non-peptide spacer,
[0214] wherein, independently for each of the peptide n-mers, n is an integer of at least 1, preferably of at least 2, more preferably of at least 3, especially of at least 4,
[0215] wherein each of the peptide n-mers is bound to the biopolymer scaffold, preferably via a linker each,
[0216] wherein, independently for each occurrence, P has an amino-acid sequence comprising a sequence fragment (in particular an epitopic sequence) with a length of at least six (preferably at least 7, more preferably at least 8, especially at least 9) amino acids of a protein sequence (preferably a capsid protein sequence, nucleocapsid protein sequence, a structural protein sequence, viral envelope- or receptor-binding-protein sequence, tegument protein sequence, viral enzyme sequence, nuclear matrix protein sequence, DNA- or RNA-binding protein sequence, viral packaging protein sequence or viral polymerase sequence, more preferably a capsid protein sequence, nucleocapsid protein sequence, a structural protein sequence, viral envelope- or receptor-binding-protein sequence, or a tegument protein sequence, in particular a capsid protein sequence) of an oncolytic virus (in particular of an oncolytic DNA virus or an oncolytic RNA virus or an oncolytic retrovirus), in particular of an AdV hexon protein sequence, an AdV fiber protein sequence, an AdV penton protein sequence, an AdV IIIa protein sequence, an AdV VI protein sequence, an AdV VIII protein sequence or an AdV IX protein sequence or of any one of the capsid protein sequences identified in FIG. 4 and FIG. 5 or of any one of the capsid protein sequences listed in Cearley et al., 2008, or of a capsid protein sequence identified by any one of UniProt P03525, P03526, P03527, P03528, P03529, P0CK31, P11078, P11079, P12418, P12419, P15024, P21270, A1Z0P5, O09800, P03170, P04288, P04289, P04291, P04486, P06477, P06484, P06487, P06491, P08314, P08392, P08543, P10185, P10190, P10191, P10192, P10193, P10200, P10202, P10204, P10205, P10210, P10216, P10218, P10219, P10220, P10225, P10227, P10228, P10229, P10231, P10234, P32888, P68333, P08362, P35971, Q89933, P35974, P35976, P69358, P12576, Q9EMA9 and P03522,
[0217] optionally wherein at most three, preferably at most two, most preferably at least one amino acid of the sequence fragment is independently substituted by any other amino acid.

[0218] Embodiment 2. The compound of embodiment 1, wherein at least one occurrence of P is a circularized peptide, preferably wherein at least 10% of all occurrences of P are circularized peptides, more preferably wherein at least 25% of all occurrences of P are circularized peptides, yet more preferably wherein at least 50% of all occurrences of P are circularized peptides, even more preferably wherein at least 75% of all occurrences of P are circularized peptides, yet even more preferably wherein at least 90% of all occurrences of P are circularized peptides or even wherein at least 95% of all occurrences of P are circularized peptides, especially wherein all of the occurrences of P are circularized peptides; or wherein at least one occurrence of P is a linear peptide, preferably wherein at least 10% of all occurrences of P are linear peptides, more preferably wherein at least 25% of all occurrences of P are linear peptides, yet more preferably wherein at least 50% of all occurrences of P are linear peptides, even more preferably wherein at least 75% of all occurrences of P are linear peptides, yet even more preferably wherein at least 90% of all occurrences of P are linear peptides or even wherein at least 95% of all occurrences of P are linear peptides, especially wherein all of the occurrences of P are linear peptides.

[0219] Embodiment 3. The compound of embodiment 1 or 2, wherein, independently for each of the peptide n-mers, n is at least 2, more preferably at least 3, especially at least 4.

[0220] Embodiment 4. The compound of any one of embodiments 1 to 3, wherein, independently for each of the peptide n-mers, n is less than 10, preferably less than 9, more preferably less than 8, even more preferably less than 7, yet even more preferably less than 6, especially less than 5.

[0221] Embodiment 5. The compound of any one of embodiments 1 to 4, wherein, for each of the peptide n-mers, n is 2.

[0222] Embodiment 6. The compound of any one of embodiments 1 to 5, wherein at least one occurrence of P is Pₐ and/or at least one occurrence of P is P_{b},
[0223] wherein Pₐ is a peptide with a sequence length of 6-13 amino acids, preferably 7-11 amino acids, more preferably 7-9 amino acids,
[0224] wherein P_{b} is a peptide with a sequence length of 6-13 amino acids, preferably 7-11 amino acids, more preferably 7-9 amino acids;
[0225] preferably wherein Pₐ and/or P_{b} comprises an epitope sequence of the protein sequence (preferably a capsid protein sequence, nucleocapsid protein sequence, a structural protein sequence, viral envelope- or receptor-binding-protein sequence, tegument protein sequence, viral enzyme sequence, nuclear matrix protein sequence, DNA- or RNA-binding protein sequence, viral packaging protein sequence or viral polymerase sequence, more preferably a capsid protein sequence, nucleocapsid protein sequence, a structural protein sequence, viral envelope- or receptor-binding-protein sequence, or a tegument protein sequence, in particular a capsid protein sequence) of the oncolytic virus or a mimotope thereof.

[0226] Embodiment 7. The compound of any one of embodiments 1 to 6, wherein, independently for each occurrence, P is Pₐ or P_{b}.

[0227] Embodiment 8. The compound of any one of embodiments 1 to 7, wherein, in the first peptide n-mer, each occurrence of P is Pₐ and, in the second peptide n-mer, each occurrence of P is P_{b}.

[0228] Embodiment 9. The compound of any one of embodiments 1 to 8, wherein
[0229] the first peptide n-mer is Pₐ—S—Pₐ and the second peptide n-mer is Pₐ—S—Pₐ; or
[0230] the first peptide n-mer is Pₐ—S—Pₐ and the second peptide n-mer is P_{b}—S—P_{b};
[0231] the first peptide n-mer is P_{b}—S—P_{b} and the second peptide n-mer is P_{b}—S—P_{b};
[0232] the first peptide n-mer is Pₐ—S—P_{b} and the second peptide n-mer is Pₐ—S—P_{b};
[0233] the first peptide n-mer is Pₐ—S—P_{b} and the second peptide n-mer is Pₐ—S—Pₐ; or
[0234] the first peptide n-mer is Pₐ—S—P_{b} and the second peptide n-mer is P_{b}—S—P_{b}.

[0235] Embodiment 10. A compound comprising
[0236] a biopolymer scaffold and at least
[0237] a first peptide n-mer which is a peptide dimer of the formula

Pₐ—S—Pₐ or Pₐ—S—P_{b},
[0238] wherein Pₐ is a peptide with a sequence length of 6-13 amino acids, preferably 7-11 amino acids, more preferably 7-9 amino acids, P_{b} is a peptide with a sequence length of 6-13 amino acids, preferably 7-11 amino acids, more preferably 7-9 amino acids, and S is a non-peptide spacer,
[0239] wherein the first peptide n-mer is bound to the biopolymer scaffold, preferably via a linker,
[0240] wherein Pₐ has an amino-acid sequence comprising a sequence fragment with a length of at least six, preferably at least seven, more preferably at least eight, especially at least 9 (or 10, 11, 12 or 13) amino acids of a protein sequence (preferably a capsid protein sequence, nucleocapsid protein sequence, a structural protein sequence, viral envelope- or receptor-binding-protein sequence, tegument protein sequence, viral enzyme sequence, nuclear matrix protein sequence, DNA- or RNA-binding protein sequence, viral packaging protein sequence or viral polymerase sequence, more preferably a capsid protein sequence, nucleocapsid protein sequence, a structural protein sequence, viral envelope- or receptor-binding-protein sequence, or a tegument protein sequence, in particular a capsid protein sequence) of a (non-pathogenic) oncolytic virus, in particular of an AdV hexon protein sequence, an AdV fiber protein sequence, an AdV penton protein sequence, an AdV IIIa protein sequence, an AdV VI protein sequence, an AdV VIII protein sequence or an AdV IX protein sequence or of any one of the capsid protein sequences identified in FIG. 4 and FIG. 5 or of any one of the capsid protein sequences listed in Cearley et al., 2008, or of a capsid protein sequence identified by any one of UniProt P03525, P03526, P03527, P03528, P03529, P0CK31, P11078, P11079, P12418, P12419, P15024, P21270, A1Z0P5, O09800, P03170, P04288, P04289, P04291, P04486, P06477, P06484, P06487, P06491, P08314, P08392, P08543, P10185, P10190, P10191, P10192, P10193, P10200, P10202, P10204, P10205, P10210, P10216, P10218, P10219, P10220, P10225, P10227, P10228, P10229, P10231, P10234, P32888, P68333, P08362, P35971, Q89933, P35974, P35976, P69358, P12576, Q9EMA9 and P03522, optionally wherein at most three, preferably at most two, most preferably at least one amino acid of the sequence fragment is independently substituted by any other amino acid.

[0241] Embodiment 11. The compound of embodiment 10, further comprising a second peptide n-mer which is a peptide dimer of the formula P_{b}—S—P_{b} or Pₐ—S—P_{b},
[0242] wherein the second peptide n-mer is bound to the biopolymer scaffold, preferably via a linker,
[0243] wherein P_{b} has an amino-acid sequence comprising a sequence fragment with a length of at least six, preferably at least seven, more preferably at least eight, especially at least 9 (or 10, 11, 12 or 13) amino acids of a protein sequence (preferably a capsid protein sequence, nucleocapsid protein sequence, a structural protein sequence, viral envelope- or receptor-binding-protein sequence, tegument protein sequence, viral enzyme sequence, nuclear matrix protein sequence, DNA- or RNA-binding protein sequence, viral packaging protein sequence or viral polymerase sequence, more preferably a capsid protein sequence, nucleocapsid protein sequence, a structural protein sequence, viral envelope- or receptor-binding-protein sequence, or a tegument protein sequence, in particular a capsid protein sequence) of a (non-pathogenic) oncolytic virus, in particular of an AdV hexon protein sequence, an AdV fiber protein sequence, an AdV penton protein sequence, an AdV IIIa protein sequence, an AdV VI protein sequence, an AdV VIII protein sequence or an AdV IX protein sequence or of any one of the capsid protein sequences identified in FIG. 4 and FIG. 5 or of any one of the capsid protein sequences listed in Cearley et al., 2008, or of a capsid protein sequence identified by any one of UniProt P03525, P03526, P03527, P03528, P03529, P0CK31, P11078, P11079, P12418, P12419, P15024, P21270, A1Z0P5, O09800, P03170, P04288, P04289, P04291, P04486, P06477, P06484, P06487, P06491, P08314, P08392, P08543, P10185, P10190, P10191, P10192, P10193, P10200, P10202, P10204, P10205, P10210, P10216, P10218, P10219, P10220, P10225, P10227, P10228, P10229, P10231, P10234, P32888, P68333, P08362, P35971, Q89933, P35974, P35976, P69358, P12576, Q9EMA9 and P03522, optionally wherein at most three, preferably at most two, most preferably at least one amino acid of the sequence fragment is independently substituted by any other amino acid.

[0244] Embodiment 12. The compound of any one of embodiments 1 to 9 and 11, wherein the first peptide n-mer is different from the second peptide n-mer.

[0245] Embodiment 13. The compound of any one of embodiments 6 to 12, wherein the peptide Pₐ is different from the peptide P_{b}, preferably wherein the peptide Pₐ and the peptide P_{b} are two different epitopes of the same viral (capsid) antigen or two different epitope parts of the same viral (capsid) epitope.

[0246] Embodiment 14. The compound of any one of embodiments 6 to 13, wherein the peptide Pₐ and the peptide P_{b} comprise the same amino-acid sequence fragment, wherein the amino-acid sequence fragment has a length of at least 2 amino acids, preferably at least 3 amino acids, more preferably at least 4 amino acids, yet more preferably at least 5 amino acids, even more preferably at least 6 amino acids, yet even more preferably at least 7 amino acids, especially at least 8 amino acids or even at least 9 amino acids.

[0247] Embodiment 15. The compound of any one of embodiments 6 to 14, wherein Pₐ and/or P_{b} is circularized.

[0248] Embodiment 16. The compound of any one of embodiments 1 to 15, wherein the compound comprises a plurality of said first peptide n-mer and/or a plurality of said second peptide n-mer.

[0249] Embodiment 17. The compound of any one of embodiments 1 to 16, wherein the biopolymer scaffold is a protein, preferably a mammalian protein such as a human protein, a non-human primate protein, a sheep protein, a pig protein, a dog protein or a rodent protein.

[0250] Embodiment 18. The compound of embodiment 17, wherein the biopolymer scaffold is a globulin.

[0251] Embodiment 19. The compound of embodiment 18, wherein the biopolymer scaffold is selected from the group consisting of immunoglobulins, alpha1-globulins, alpha2-globulins and beta-globulins.

[0252] Embodiment 20. The compound of embodiment 19, wherein the biopolymer scaffold is selected from the group consisting of immunoglobulin G, haptoglobin and transferrin.

[0253] Embodiment 21. The compound of embodiment 20, wherein the biopolymer scaffold is haptoglobin.

[0254] Embodiment 22. The compound of embodiment 17, wherein the biopolymer scaffold is an albumin.

[0255] Embodiment 23. The compound of any one of embodiments 1 to 22, wherein the compound is non-immunogenic in a mammal, preferably in a human, in a non-human primate, in a sheep, in a pig, in a dog or in a rodent.

[0256] Embodiment 24. The compound of any one of embodiments 1 to 23, wherein the compound is for (transient) intracorporeal sequestration (or intracorporeal depletion) of at least one antibody (against the oncolytic virus or neutralizing the oncolytic virus) in an individual, preferably in the bloodstream of the individual and/or for reduction of the titre of at least one antibody (against the oncolytic virus or neutralizing the oncolytic virus) in the individual, preferably in the bloodstream of the individual.

[0257] Embodiment 25. The compound of any one of embodiments 1 to 24, wherein the oncolytic virus is an adenovirus (AdV), an adeno-associated virus (AAV), a measles virus, a Herpes simplex virus (HSV), a poxvirus such as Vaccinia virus, a reovirus, a Newcastle disease virus (NVD), a rhabdovirus, a coxsackievirus, a lentivirus, an alphavirus such as Semliki Forest virus, a vesicular stomatitis virus (VSS), a myxoma virus (MYXV), a mengovirus, a bovine viral diarrhea virus (BVDV), a chimeric oncolytic virus, a picornavirus, a parvovirus or a flavivirus.

[0258] Embodiment 26. The compound of any one of embodiments 1 to 25, wherein the entire sequence, optionally with the exception of an N-terminal and/or C-terminal cysteine, of at least one occurrence of P, preferably of at least 10% of all occurrences of P, more preferably of at least 25% of all occurrences of P, yet more preferably of at least 50% of all occurrences of P, even more preferably of at least 75% of all occurrences of P, yet even more preferably of at least 90% of all occurrences of P or even of at least 95% of all occurrences of P, especially of all of the occurrences of P, is identical to a sequence fragment of a protein, wherein the protein is identified by one of the following UniProt accession codes:
[0259] A9RAI0, B5SUY7, O41855, O56137, O56139, P03135, P04133, P04882, P08362, P10269, P12538, P69353, Q5Y9B2, Q5Y9B4, Q65311, Q6JC40, Q6VGT5, Q8JQF8, Q8JQG0, Q98654, Q9WBP8, Q9YIJ1, or of an AdV hexon protein, an AdV fiber protein, an AdV penton protein, an AdV IIIa protein, an AdV VI protein, an AdV VIII protein or an AdV IX protein or of any one of the capsid proteins identified in FIG. 4 and FIG. 5 or of any one of the capsid proteins listed in Cearley et al., 2008, or of a capsid protein sequence identified by any one of UniProt P03525, P03526, P03527, P03528, P03529, P0CK31, P11078, P11079, P12418, P12419, P15024, P21270, A1Z0P5, O09800, P03170, P04288, P04289, P04291, P04486, P06477, P06484, P06487, P06491, P08314, P08392, P08543, P10185, P10190, P10191, P10192, P10193, P10200, P10202, P10204, P10205, P10210, P10216, P10218, P10219, P10220, P10225, P10227, P10228, P10229, P10231, P10234, P32888, P68333, P08362, P35971, Q89933, P35974, P35976, P69358, P12576, Q9EMA9 and P03522;
[0260] optionally wherein the sequence fragment comprises at most three, even more preferably at most two, especially at most one amino acid substitutions.

[0261] Embodiment 27. The compound of any one of embodiments 1 to 26, wherein the entire sequence, optionally with the exception of an N-terminal and/or C-terminal cysteine, of peptide Pₐ is identical to a sequence fragment of a protein, wherein the protein is identified by one of the UniProt accession codes listed in embodiment 26; optionally wherein the sequence fragment comprises at most three, even more preferably at most two, especially at most one amino acid substitutions.

[0262] Embodiment 28. The compound of any one of embodiments 1 to 27, wherein the entire sequence, optionally with the exception of an N-terminal and/or C-terminal cysteine, of peptide P_{b} is identical to a sequence fragment of a protein, wherein the protein is identified by one of the UniProt accession codes listed in embodiment 26; optionally wherein the sequence fragment comprises at most three, even more preferably at most two, especially at most one amino acid substitutions.

[0263] Embodiment 29. The compound of any one of embodiments 1 to 28, wherein the entire sequence, optionally with the exception of an N-terminal and/or C-terminal cysteine, of peptide Pₐ is identical to a sequence fragment of a protein and the entire sequence, optionally with the exception of an N-terminal and/or C-terminal cysteine, of peptide P_{b} is identical to the same or another, preferably another, sequence fragment of the same protein, wherein the protein is identified by one of the UniProt accession codes listed in embodiment 26;
[0264] optionally wherein the sequence fragment comprises at most three, even more preferably at most two, especially at most one amino acid substitutions.

[0265] Embodiment 30. The compound of any one of embodiments 1 to 29, wherein said sequence fragment comprises a sequence of at least 4 or at least 5 or at least 6, preferably at least 7, more preferably at least 8, even more preferably at least 9, yet even more preferably at least 10 consecutive amino acids selected from:
[0266] the group of AdV sequences ETGPPTVPFLTPPF (SEQ ID NO: 32), HDSKLSIATQGPL (SEQ ID NO: 33), LNLRLGQGPLFINSAHNLDINY (SEQ ID NO: 34), VDPMDEPTLLYVLFEVEDVV (SEQ ID NO: 35), MKRARPSEDTENPVYPYD (SEQ ID NO: 36), ISGTVQSAHLIIRFD (SEQ ID NO: 37), LGQGPLFINSAHNLDINYNKGLYLF (SEQ ID NO: 38), SYPFDAQNQLNLRLGQGPLFIN (SEQ ID NO: 39), GDTTPSAYSMSFSWDWSGHNYIN (SEQ ID NO: 40), VLLNNSFLDPEYWNFRN (SEQ ID NO: 41), HNYINEIFATSSYTESYIA (SEQ ID NO: 42), DEAATALEINLEEEDDDNEDEVDEQAEQQKTH (SEQ ID NO: 43), INLEEEDDDNEDEVDEQAEQ (SEQ ID NO: 44), DNEDEVDEQAEQQKTHVF (SEQ ID NO: 45), EWDEAATALEINLEE (SEQ ID NO: 46), PKVVLYSEDVDIETPDTHISYMP (SEQ ID NO: 47), YIPESYKDRMYSFFRNF (SEQ ID NO: 48), DSIGDRTRYFSMW (SEQ ID NO: 49), SYKDRMYSFERNF (SEQ ID NO: 50), and FLVOMLANYNIGYQGFY (SEQ ID NO: 51), or
[0267] the group of AAV sequences WONRDVYLQGPIWAKIP (SEQ ID NO: 52), DNTYFGYSTPWGYFDFNRFHC (SEQ ID NO: 53), MANQAKNWLPGPCY (SEQ ID NO: 54), LPYVLGSAHQGCLPPFP (SEQ ID NO: 55), NGSQAVGRSSFYCLEYF (SEQ ID NO: 56), PLIDQYLYYL (SEQ ID NO: 57), EERFFPSNGILIF (SEQ ID NO: 58) ADGVGSSSGNWHC (SEQ ID NO: 59), SEQ ID NOs: 383-1891 (see Table 1)-preferably group III of Table 1, more preferably group II of Table 1, especially group I of Table 1—and SEQ ID NOs: 1892-2063 (see Table 2)-preferably group I of Table 2—and sequences of group II or III of Table 3 (in particular SEQ ID NOs: 2064-2103), more preferably sequences of group I of Table 3, or the group of sequences of Table 4, in particular the group of sequences identified by SEQ ID NOs: 2104-2190, or the group of sequences of Table 5;
[0268] optionally wherein at most three, preferably at most two, most preferably at least one amino acid of the sequence fragment is independently substituted by any other amino acid.

[0269] Embodiment 31. The compound of any one of embodiments 1 to 30, wherein, independently for each occurrence, P comprises a 6-amino-acid fragment, preferably a 7-amino-acid-fragment, more preferably a 8-amino-acid-fragment, even more preferably a 9-amino-acid fragment, yet even more preferably a 10-amino-acid fragment, especially an entire sequence selected from the group of sequences consisting of GPPTVPFLTP (SEQ ID NO: 60), ETGPPTVPFLIPP (SEQ ID NO: 61), TGPPTVPFLT (SEQ ID NO: 62), PTVPELTPPF (SEQ ID NO: 63), HDSKLSIATQGPL (SEQ ID NO: 64), SIATQGP (SEQ ID NO: 65), NLRLGQGPLF (SEQ ID NO: 66), QGPLFINSAH (SEQ ID NO: 67), PLFINSAHNLD (SEQ ID NO: 68), LGQGPLF (SEQ ID NO: 69), LNLRLGQGPL (SEQ ID NO: 70), GQGPLFI (SEQ ID NO: 71), NLRLGQGPLFINS (SEQ ID NO: 72), LFINSAHNLDINY (SEQ ID NO: 73), FINSAHNLDI (SEQ ID NO: 74), LRLGQGPLFI (SEQ ID NO: 75), GPLFINSAHN (SEQ ID NO: 76), DEPTLLYVLFEVF (SEQ ID NO: 77), TLLYVLFEVE (SEQ ID NO: 78), DEPTLLYVLF (SEQ ID NO: 79), TLLYVLFEVEDVV (SEQ ID NO: 80), TLLYVLF (SEQ ID NO: 81), MDEPTLLYVLFEV (SEQ ID NO: 82), EPTLLYVLFE (SEQ ID NO: 83), DPMDEPTLLYVLF (SEQ ID NO: 84), LLYVLFEVED (SEQ ID NO: 85), YVLFEVEDVV (SEQ ID NO: 86), PTLLYVLFEV (SEQ ID NO: 87), PTLLYVLFEVFDV (SEQ ID NO: 88), LYVLFEVEDV (SEQ ID NO: 89), EPTLLYVLFEVED (SEQ ID NO: 90), LYVLFEV (SEQ ID NO: 91), PMDEPTLLYVLFE (SEQ ID NO: 92), LLYVLFE (SEQ ID NO: 93), VDPMDEPTLLYVL (SEQ ID NO: 94), YVLFEVE (SEQ ID NO: 95), PTLLYVL (SEQ ID NO: 96), MKRARPSEDTF (SEQ ID NO: 97), KRARPSEDTF (SEQ ID NO: 98), MKRARPSEDT (SEQ ID NO: 99), MKRARPSEDTEN (SEQ ID NO: 100), ARPSEDTENP (SEQ ID NO: 101), RARPSEDTEN (SEQ ID NO: 102), RPSEDTE (SEQ ID NO: 103), MKRARPSEDTENP (SEQ ID NO: 104), RARPSEDTENPVY (SEQ ID NO: 105), ARPSEDT (SEQ ID NO: 106), EDTENPVYPY (SEQ ID NO: 107), RPSEDTENPVYPY (SEQ ID NO: 108), KRARPSEDTENPV (SEQ ID NO: 109), DTFNPVY (SEQ ID NO: 110), RPSEDTENPV (SEQ ID NO: 111), PSEDTENPVY (SEQ ID NO: 112), DTENPVYPYD (SEQ ID NO: 113), VOSAHLIIRF (SEQ ID NO: 114), AHLIIRF (SEQ ID NO: 115), SGTVQSAHLIIRF (SEQ ID NO: 116), TVQSAHLIIR (SEQ ID NO: 117), HLIIRFD (SEQ ID NO: 118), SAHLIIR (SEQ ID NO: 119), QSAHLIIRED (SEQ ID NO: 120), ISGTVQSAHLIIR (SEQ ID NO: 121), GTVQSAHLII (SEQ ID NO: 122), GTVQSAHLIIRED (SEQ ID NO: 123), QSAHLII (SEQ ID NO: 124), HNLDINY (SEQ ID NO: 125), LFINSAHNLDINY (SEQ ID NO: 126), NLDINYNKGLYLF (SEQ ID NO: 127), FVSPNG (SEQ ID NO: 128), NYINEIF (SEQ ID NO: 129), NKGLYLF (SEQ ID NO: 130), INYNKGLYLF (SEQ ID NO: 131), NSAHNLDINY (SEQ ID NO: 132), WDWSGHNYINEIF (SEQ ID NO: 133), SGHNYINEIF (SEQ ID NO: 134), LGTGLSF (SEQ ID NO: 135), PFLTPPF (SEQ ID NO: 136), LGQGPLF (SEQ ID NO: 137), NLRLGQGPLF (SEQ ID NO: 138), NQLNLRLGQGPLF (SEQ ID NO: 139), GOGPLFI (SEQ ID NO: 140), QLNLRLGQGPLFI (SEQ ID NO: 141), SYPFDAQNQLNLR (SEQ ID NO: 142), YPFDAQNOLNLRL (SEQ ID NO: 143), LRLGQGPLFI (SEQ ID NO: 144), NOLNLRL (SEQ ID NO: 145), FDAONOLNLR (SEQ ID NO: 146), QNOLNLR (SEQ ID NO: 147), QGPLFIN (SEQ ID NO: 148), PFDAQNOLNLRLG (SEQ ID NO: 149), DAQNQLNLRL (SEQ ID NO: 150), RLGQGPLFIN (SEQ ID NO: 151), QLNLRLG (SEQ ID NO: 152), FDAQNQLNLRLGQ (SEQ ID NO: 153), LNLRLGQGPLFIN (SEQ ID NO: 154), AQNOLNLRLG (SEQ ID NO: 155), AQNQLNL (SEQ ID NO: 156), LNLRLGO (SEQ ID NO: 157), SYPFDAQNQL (SEQ ID NO: 158), PFDAQNOLNL (SEQ ID NO: 159), YSMSFSW (SEQ ID NO: 160), TPSAYSMSFSWDW (SEQ ID NO: 161), MSFSWDW (SEQ ID NO: 162), PSAYSMSFSW (SEQ ID NO: 163), DTTPSAYSMSFSW (SEQ ID NO: 164), TTPSAYSMSF (SEQ ID NO: 165), YSMSFSWDWS (SEQ ID NO: 166), TGDTTPSAYSMSF (SEQ ID NO: 167), FSWDWSGHNY (SEQ ID NO: 168), SFSWDWS (SEQ ID NO: 169), SAYSMSF (SEQ ID NO: 170), SFSWDWSGHN (SEQ ID NO: 171), SAYSMSFSWD (SEQ ID NO: 172), SMSFSWD (SEQ ID NO: 173), SWDWSGHNYI (SEQ ID NO: 174), AYSMSFS (SEQ ID NO: 175), SMSFSWDWSGHNY (SEQ ID NO: 176), FSWDWSG (SEQ ID NO: 177), SWDWSGH (SEQ ID NO: 178), FLDPEYWNER (SEQ ID NO: 179), SELDPEYWNF (SEQ ID NO: 180), PEYWNER (SEQ ID NO: 181), LNNSELDPEYWNF (SEQ ID NO: 182), NNSFLDPEYWNER (SEQ ID NO: 183), FLDPEYW (SEQ ID NO: 184), DPEYWNF (SEQ ID NO: 185), NNSFLDPEYW (SEQ ID NO: 186), VLLNNSFLDPEYW (SEQ ID NO: 187), EYWNFRN (SEQ ID NO: 188), LNNSFLDPEY (SEQ ID NO: 189), LDPEYWNERN (SEQ ID NO: 190), LNNSFLD (SEQ ID NO: 191), NSFLDPEYWN (SEQ ID NO: 192), SSYTESY (SEQ ID NO: 193), FATSSYTESY (SEQ ID NO: 194), YINEIFATSSYTF (SEQ ID NO: 195), SYTESYI (SEQ ID NO: 196), ATSSYTF (SEQ ID NO: 197), EIFATSSYTF (SEQ ID NO: 198), NEIFATSSYTFSY (SEQ ID NO: 199), ATSSYTESYI (SEQ ID NO: 200), HNYINEIFATSSY (SEQ ID NO: 201), IFATSSY (SEQ ID NO: 202), INEIFATSSY (SEQ ID NO: 203), NYINEIFATSSYT (SEQ ID NO: 204), YINEIFA (SEQ ID NO: 205), YTESYIA (SEQ ID NO: 206), EIFATSSYTESYI (SEQ ID NO: 207), ALEINLEEEDDDN (SEQ ID NO: 208), ATALEINLEEEDD (SEQ ID NO: 209), EAATALEINLEEE (SEQ ID NO: 210), LEINLEE (SEQ ID NO: 211), TALEINLEEEDDD (SEQ ID NO: 212), EINLEEE (SEQ ID NO: 213), ALEINLEEED (SEQ ID NO: 214), LEINLEEEDD (SEQ ID NO: 215), TALEINLEEE (SEQ ID NO: 216), DEAATALEINLEE (SEQ ID NO: 217), LEINLEEEDDDNE (SEQ ID NO: 218), AATALEINLEEED (SEQ ID NO: 219), EINLEEEDDD (SEQ ID NO: 220), ATALEINLEE (SEQ ID NO: 221), INLEEEDDDN (SEQ ID NO: 222), NLEEEDDDNE (SEQ ID NO: 223), DEVDEQA (SEQ ID NO: 224), EDDDNEDEVDEQA (SEQ ID NO: 225), DDNEDEVDEQAEQ (SEQ ID NO: 226), EVDEQAE (SEQ ID NO: 227), DNEDEVDEQA (SEQ ID NO: 228), VDEQAEQ (SEQ ID NO: 229), EDEVDEQAEQQKT (SEQ ID NO: 230), EDEVDEQAEQ (SEQ ID NO: 231), DEVDEQAEQQKTH (SEQ ID NO: 232), NEDEVDEQAEQOK (SEQ ID NO: 233), DEVDEQAEQQ (SEQ ID NO: 234), EINLEEEDDDNED (SEQ ID NO: 235), NLEEEDDDNEDEV (SEQ ID NO: 236), INLEEED (SEQ ID NO: 237), LEEEDDDNED (SEQ ID NO: 238), INLEEEDDDNEDE (SEQ ID NO: 239), DDDNEDEVDEQAE (SEQ ID NO: 240), LEEEDDDNEDEVD (SEQ ID NO: 241), DDNEDEVDEQ (SEQ ID NO: 242), EDDDNED (SEQ ID NO: 243), NLEEEDD (SEQ ID NO: 244), DDNEDEV (SEQ ID NO: 245), DDDNEDEVDE (SEQ ID NO: 246), DDDNEDE (SEQ ID NO: 247), (SEQ ID NO: 248), EEDDDNE (SEQ ID NO: 249), EDDDNEDEVD EEEDDDNEDE (SEQ ID NO: 250), EDEVDEQ (SEQ ID NO: 251), EEDDDNEDEVDEQ (SEQ ID NO: 252), EEDDDNEDEV (SEQ ID NO: 253), EEEDDDNEDEVDE (SEQ ID NO: 254), EVDEQAEQOK (SEQ ID NO: 255), DNEDEVDEQAEQQ (SEQ ID NO: 256), VDEQAEQQKT (SEQ ID NO: 257), EVDEQAEQQKTHV (SEQ ID NO: 258), VDEQAEQQKTHVF (SEQ ID NO: 259), ALEINLE (SEQ ID NO: 260), WDEAATALEINLE (SEQ ID NO: 261), A AATALEINLE (SEQ ID NO: 262), EWDEAATALEINL (SEQ ID NO: 263), EAATALEINL (SEQ ID NO: 264), LYSEDVDIET (SEQ ID NO: 265), LYSEDVDIETPDT (SEQ ID NO: 266), KVVLYSEDVDIET (SEQ ID NO: 267), IETPDTH (SEQ ID NO: 268), VDIETPDTHI (SEQ ID NO: 269), VLYSEDVDIE (SEQ ID NO: 270), DVDIETPDTHISY (SEQ ID NO: 271), VVLYSEDVDIETP (SEQ ID NO: 272), SEDVDIETPDTHI (SEQ ID NO: 273), ETPDTHI (SEQ ID NO: 274), VLYSEDVDIETPD (SEQ ID NO: 275), DVDIETPDTH (SEQ ID NO: 276), DIETPDTHIS (SEQ ID NO: 277), EDVDIETPDTHIS (SEQ ID NO: 278), IETPDTHISY (SEQ ID NO: 279), YSEDVDIETPDTH (SEQ ID NO: 280), VDIETPDTHISYM (SEQ ID NO: 281), PKVVLYSEDVDIE (SEQ ID NO: 282), DIETPDT (SEQ ID NO: 283), DIETPDTHISYMP (SEQ ID NO: 284), EDVDIETPDT (SEQ ID NO: 285), ETPDTHISYM (SEQ ID NO: 286), IETPDTHISYMP (SEQ ID NO: 287), DRMYSFERNF (SEQ ID NO: 288), DRMYSFF (SEQ ID NO: 289), YSFERNF (SEQ ID NO: 290), IPESYKDRMYSFF (SEQ ID NO: 291), SYKDRMYSFF (SEQ ID NO: 292), ESYKDRMYSF (SEQ ID NO: 293), KDRMYSF (SEQ ID NO: 294), YIPESYKDRMYSF (SEQ ID NO: 295), PESYKDRMYSFFR (SEQ ID NO: 296), YKDRMYSFER (SEQ ID NO: 297), TRYFSMW (SEQ ID NO: 298), GDRTRYF (SEQ ID NO: 299), DSIGDRTRYF (SEQ ID NO: 300), DSIGDRTRYFSMW (SEQ ID NO: 301), GDRTRYFSMW (SEQ ID NO: 302), DRMYSFERNF (SEQ ID NO: 303), SYKDRMYSFERNF (SEQ ID NO: 304), NYNIGYOGFY (SEQ ID NO: 305), ANYNIGYQGF (SEQ ID NO: 306), MLANYNIGYQGFY (SEQ ID NO: 307), IGYQGFY (SEQ ID NO: 308), FLVQMLANYNIGY (SEQ ID NO: 309), NIGYQGF (SEQ ID NO: 310) and QMLANYNIGYQGF (SEQ ID NO: 311), optionally wherein at most three, preferably at most two, most preferably at least one amino acid is independently substituted by any other amino acid.

[0270] Embodiment 32. The compound of any one of embodiments 1 to 30, wherein, independently for each occurrence, P comprises a 6-amino-acid fragment, preferably a 7-amino-acid-fragment, more preferably a 8-amino-acid-fragment, even more preferably a 9-amino-acid fragment, yet even more preferably a 10-amino-acid fragment, especially an entire sequence selected from the group of sequences consisting of YLQGPIW (SEQ ID NO: 312), VYLQGPI (SEQ ID NO: 313), WONRDVY (SEQ ID NO: 314), DVYLQGP (SEQ ID NO: 315), QNRDVYL (SEQ ID NO: 316), LOGPIWA (SEQ ID NO: 317), RDVYLQG (SEQ ID NO: 318), NRDVYLQ (SEQ ID NO: 319), YFGYSTPWGYFDF (SEQ ID NO: 320), FGYSTPWGYF (SEQ ID NO: 321), GYSTPWGYFD (SEQ ID NO: 322), YSTPWGYFDF (SEQ ID NO: 323), NTYFGYSTPWGYF (SEQ ID NO: 324), TPWGYFDFNRFHC (SEQ ID NO: 325), TYFGYSTPWGYFD (SEQ ID NO: 326), DNTYFGYSTPWGY (SEQ ID NO: 327), YFGYSTPWGY (SEQ ID NO: 328), FGYSTPWGYFDEN (SEQ ID NO: 329), NWLPGPC (SEQ ID NO: 330), WLPGPCY (SEQ ID NO: 331), QAKNWLPGPC (SEQ ID NO: 332), AKNWLPGPCY (SEQ ID NO: 333), MANQAKNWLPGPC (SEQ ID NO: 334), QGCLPPF (SEQ ID NO: 335), GCLPPFP (SEQ ID NO: 336), VLGSAHQGCLPPF (SEQ ID NO: 337), LPYVLGSAHQGCL (SEQ ID NO: 338), YVLGSAHQGC (SEQ ID NO: 339), CLPPFPA (SEQ ID NO: 340), SAHQGCLPPF (SEQ ID NO: 341), VLGSAHQGCL (SEQ ID NO: 342), PYVLGSAHQGCLP (SEQ ID NO: 343), GRSSFYC (SEQ ID NO: 344), AVGRSSFYCLEYF (SEQ ID NO: 345), AVGRSSFYCL (SEQ ID NO: 346), QAVGRSSFYCLEY (SEQ ID NO: 347), NGSQAVGRSSFYC (SEQ ID NO: 348), DOYLYYL (SEQ ID NO: 349), PLIDQYLYYL (SEQ ID NO: 350), IDQYLYY (SEQ ID NO: 351), FFPSNGILIF (SEQ ID NO: 352), EERFFPSNGILIF (SEQ ID NO: 353), VGSSSGNWHC (SEQ ID NO: 354) and ADGVGSSSGNWHC (SEQ ID NO: 355), optionally wherein at most three, preferably at most two, most preferably at least one amino acid is independently substituted by any other amino acid; or wherein, independently for each occurrence, P comprises a 6-amino-acid fragment, preferably a 7-amino-acid-fragment, more preferably a 8-amino-acid-fragment, even more preferably a 9-amino-acid fragment, yet even more preferably a 10-amino-acid fragment or even a 11-amino-acid-fragment or yet even a 12-amino-acid-fragment, especially a 13-amino-acid-fragment selected from the group of sequences consisting of SEQ ID NOS: 383-1891 (see Table 1)-preferably group III of Table 1, more preferably group II of Table 1, especially group I of Table 1—and SEQ ID NOs: 1892-2063 (see Table 2)-preferably group I of Table 2—and sequences of group II or III of Table 3 (in particular SEQ ID NOs: 2064-2103), more preferably sequences of group I of Table 3, optionally wherein at most three, preferably at most two, most preferably at least one amino acid is independently substituted by any other amino acid; or wherein, independently for each occurrence, P comprises a 6-amino-acid fragment, preferably a 7-amino-acid-fragment, more preferably a 8-amino-acid-fragment, even more preferably a 9-amino-acid fragment, yet even more preferably a 10-amino-acid fragment or even a 11-amino-acid-fragment or yet even a 12-amino-acid-fragment, especially a 13-amino-acid-fragment selected from the group of sequences of Table 4, in particular the group of sequences identified by SEQ ID NOs: 2104-2190, or the group of sequences of Table 5, optionally wherein at most three, preferably at most two, most preferably at least one amino acid is independently substituted by any other amino acid.

[0271] Embodiment 33. The compound of any one of embodiments 1 to 32, wherein, independently for each occurrence, P consists of a 6-amino-acid fragment, preferably a 7-amino-acid-fragment, more preferably a 8-amino-acid-fragment, even more preferably a 9-amino-acid fragment, yet even more preferably a 10-amino-acid fragment, especially an entire sequence selected from the group of sequences set forth in embodiment 31 or selected from the group of sequences set forth in embodiment 32, optionally wherein at most three, preferably at most two, most preferably at least one amino acid is independently substituted by any other amino acid, optionally with an N-terminal and/or C-terminal cysteine residue.

[0272] Embodiment 34. The compound of any one of embodiments 1 to 33, wherein each of the peptide n-mers is covalently bound to the biopolymer scaffold, preferably via a linker each.

[0273] Embodiment 35. The compound of any one of embodiments 1 to 34, wherein at least one of said linkers is selected from disulphide bridges and PEG molecules.

[0274] Embodiment 36. The compound of any one of embodiments 1 to 35, wherein at least one of the spacers S is selected from PEG molecules or glycans.

[0275] Embodiment 37. The compound of any one of embodiments 1 to 36, wherein Pₐ comprises a 6-amino-acid fragment, preferably a 7-amino-acid-fragment, more preferably a 8-amino-acid-fragment, even more preferably a 9-amino-acid fragment, yet even more preferably a 10-amino-acid fragment, especially an entire sequence selected from the group of sequences set forth in embodiment 31, optionally wherein at most three, preferably at most two, most preferably at least one amino acid is independently substituted by any other amino acid.

[0276] Embodiment 38. The compound of any one of embodiments 1 to 37, wherein P_{b} comprises a 6-amino-acid fragment, preferably a 7-amino-acid-fragment, more preferably a 8-amino-acid-fragment, even more preferably a 9-amino-acid fragment, yet even more preferably a 10-amino-acid fragment, especially an entire sequence selected from the group of sequences set forth in embodiment 31, optionally wherein at most three, preferably at most two, most preferably at least one amino acid is independently substituted by any other amino acid.

[0277] Embodiment 39. The compound of any one of embodiments 1 to 36, wherein Pₐ comprises a 6-amino-acid fragment, preferably a 7-amino-acid-fragment, more preferably a 8-amino-acid-fragment, even more preferably a 9-amino-acid fragment, yet even more preferably a 10-amino-acid fragment, especially an entire sequence selected from the group of sequences set forth in embodiment 32, optionally wherein at most three, preferably at most two, most preferably at least one amino acid is independently substituted by any other amino acid.

[0278] Embodiment 40. The compound of any one of embodiments 1 to 37, wherein P_{b} comprises a 6-amino-acid fragment, preferably a 7-amino-acid-fragment, more preferably a 8-amino-acid-fragment, even more preferably a 9-amino-acid fragment, yet even more preferably a 10-amino-acid fragment, especially an entire sequence selected from the group of sequences set forth in embodiment 32, optionally wherein at most three, preferably at most two, most preferably at least one amino acid is independently substituted by any other amino acid.

[0279] Embodiment 41. The compound of any one of embodiments 6 to 40, wherein the first peptide n-mer is Pₐ—S—P_{b} and the second peptide n-mer is Pₐ—S—P_{b}.

[0280] Embodiment 42. The compound of any one of embodiments 6 to 41, wherein the peptide Pₐ and the peptide P_{b} comprise the same amino-acid sequence fragment, wherein the amino-acid sequence fragment has a length of at least 5 amino acids, even more preferably at least 6 amino acids, yet even more preferably at least 7 amino acids, especially at least 8 amino acids or even at least 9 amino acids.

[0281] Embodiment 43. The compound of any one of embodiments 1 to 42, wherein Pₐ consists of a 6-amino-acid fragment, preferably a 7-amino-acid-fragment, more preferably a 8-amino-acid-fragment, even more preferably a 9-amino-acid fragment, yet even more preferably a 10-amino-acid fragment, especially an entire sequence selected from the group of sequences set forth in embodiment 31, optionally wherein at most three, preferably at most two, most preferably at least one amino acid is independently substituted by any other amino acid, optionally with an N-terminal and/or C-terminal cysteine residue.

[0282] Embodiment 44. The compound of any one of embodiments 1 to 43, wherein P_{b} consists of a 6-amino-acid fragment, preferably a 7-amino-acid-fragment, more preferably a 8-amino-acid-fragment, even more preferably a 9-amino-acid fragment, yet even more preferably a 10-amino-acid fragment, especially an entire sequence selected from the group of sequences set forth in embodiment 31, optionally wherein at most three, preferably at most two, most preferably at least one amino acid is independently substituted by any other amino acid, optionally with an N-terminal and/or C-terminal cysteine residue.

[0283] Embodiment 45. The compound of any one of embodiments 1 to 42, wherein Pₐ consists of a 6-amino-acid fragment, preferably a 7-amino-acid-fragment, more preferably a 8-amino-acid-fragment, even more preferably a 9-amino-acid fragment, yet even more preferably a 10-amino-acid fragment, especially an entire sequence selected from the group of sequences set forth in embodiment 32, optionally wherein at most three, preferably at most two, most preferably at least one amino acid is independently substituted by any other amino acid, optionally with an N-terminal and/or C-terminal cysteine residue.

[0284] Embodiment 46. The compound of any one of embodiments 1 to 43, wherein P_{b} consists of a 6-amino-acid fragment, preferably a 7-amino-acid-fragment, more preferably a 8-amino-acid-fragment, even more preferably a 9-amino-acid fragment, yet even more preferably a 10-amino-acid fragment, especially an entire sequence selected from the group of sequences set forth in embodiment 32, optionally wherein at most three, preferably at most two, most preferably at least one amino acid is independently substituted by any other amino acid, optionally with an N-terminal and/or C-terminal cysteine residue

[0285] Embodiment 47. The compound of embodiments 1 to 46, wherein the first peptide n-mer is Pₐ—S—P_{b} and the second peptide n-mer is Pₐ—S—P_{b}.

[0286] Embodiment 48. The compound of embodiments 1 to 47, wherein the peptide Pₐ and the peptide P_{b} comprise the same amino-acid sequence fragment, wherein the amino-acid sequence fragment has a length of at least 5 amino acids, even more preferably at least 6 amino acids, yet even more preferably at least 7 amino acids, especially at least 8 amino acids or even at least 9 amino acids.

[0287] Embodiment 49. The compound of any one of embodiments 1 to 48, wherein the oncolytic virus is non-pathogenic (in the individual to be treated).

[0288] Embodiment 50. The compound of any one of embodiments 1 to 49, wherein the biopolymer scaffold is an anti-CD163 antibody (i.e. an antibody specific for a CD163 protein) or CD163-binding fragment thereof.

[0289] Embodiment 51. The compound of embodiment 50, wherein the anti-CD163 antibody or CD163-binding fragment thereof is specific for human CD163 and/or is specific for the extracellular region of CD163, preferably for an SRCR domain of CD163, more preferably for any one of SRCR domains 1-9 of CD163, even more preferably for any one of SRCR domains 1-3 of CD163, especially for SRCR domain 1 of CD163.

[0290] Embodiment 52. The compound of embodiment 50 or 51, wherein the anti-CD163 antibody or CD163-binding fragment thereof is specific for one of the following peptides:
[0291] a peptide consisting of 7-25, preferably 8-20, even more preferably 9-15, especially 10-13 amino acids, wherein the peptide comprises the amino acid sequence CSGRVEVKVQEEWGTVCNNGWSMEA (SEQ ID NO: 3) or a 7-24 amino-acid fragment thereof,
[0292] a peptide consisting of 7-25, preferably 8-20, even more preferably 9-15, especially 10-13 amino acids, wherein the peptide comprises the amino acid sequence DHVSCRGNESALWDCKHDGWG (SEQ ID NO: 13) or a 7-20 amino-acid fragment thereof, or
[0293] a peptide consisting of 7-25, preferably 8-20, even more preferably 9-15, especially 10-13 amino acids, wherein the peptide comprises the amino acid sequence SSLGGTDKELRLVDGENKCS (SEQ ID NO: 24) or a 7-19 amino-acid fragment thereof.

[0294] Embodiment 53. The compound of embodiment 50 or 51, wherein the anti-CD163 antibody or CD163-binding fragment thereof is specific for a peptide comprising the amino acid sequence ESALW (SEQ ID NO: 14) or ALW.

[0295] Embodiment 54. The compound of embodiment 50 or 51, wherein the anti-CD163 antibody or CD163-binding fragment thereof is specific for a peptide comprising the amino acid sequence GRVEVKVQEEW (SEQ ID NO: 4), WGTVCNNGWS (SEQ ID NO: 5) or WGTVCNNGW (SEQ ID NO: 6),

[0296] Embodiment 55. The compound of embodiment 50 or 51, wherein the anti-CD163 antibody or CD163-binding fragment thereof is specific for a peptide comprising the amino acid sequence SSLGGTDKELR (SEQ ID NO: 25) or SSLGG (SEQ ID NO: 26).

[0297] Embodiment 56. The compound of any one of embodiments 1 to 55, wherein the oncolytic virus is AAV1, AAV2, AAV3, AAV5, AAV7 or AAV8.

[0298] Embodiment 57. The compound of any one of embodiments 1 to 55, wherein the oncolytic virus is AAV8.

[0299] Embodiment 58. The compound of any one of embodiments 1 to 55, wherein the oncolytic virus is Ad5.

[0300] Embodiment 59. The compound of any one of embodiments 58, wherein the oncolytic virus is AdHu5.

[0301] Embodiment 60. The compound of any one of embodiments 1 to 59, wherein the oncolytic virus is an oncolytic virus specific for a mammal, in particular a human.

[0302] Embodiment 61. The compound of any one of embodiments 1 to 60, wherein the biopolymer scaffold is selected from human immunoglobulins and human transferrin.

[0303] Embodiment 62. The compound of embodiment any one of embodiments 1 to 61, wherein the biopolymer scaffold is human transferrin.

[0304] Embodiment 63. The compound of any one of embodiments 49 to 62, wherein at least one of the at least two peptides is circularized.

[0305] Embodiment 64. The compound of any one of embodiments 1 to 63, wherein the compound is non-immunogenic in humans.

[0306] Embodiment 65. A pharmaceutical composition comprising the compound of any one of embodiments 1 to 64 and at least one pharmaceutically acceptable excipient.

[0307] Embodiment 66. The pharmaceutical composition of embodiment 65, wherein the composition is prepared for intraperitoneal, subcutaneous, intramuscular and/or intravenous administration and/or wherein the composition is for repeated administration.

[0308] Embodiment 67. The pharmaceutical composition of any one of embodiments 1 to 66, wherein the molar ratio of peptide P to biopolymer scaffold in the composition is from 2:1 to 100:1, preferably from 3:1 to 90:1, more preferably from 4:1 to 80:1, even more preferably from 5:1 to 70:1, yet even more preferably from 6:1 to 60:1, especially from 7:1 to 50:1 or even from 8:10 to 40:1.

[0309] Embodiment 68. The pharmaceutical composition of any one of embodiments 6 to 67, wherein the molar ratio of peptide Pₐ to biopolymer scaffold in the composition is from 2:1 to 100:1, preferably from 3:1 to 90:1, more preferably from 4:1 to 80:1, even more preferably from 5:1 to 70:1, yet even more preferably from 6:1 to 60:1, especially from 7:1 to 50:1 or even from 8:10 to 40:1.

[0310] Embodiment 69. The pharmaceutical composition of any one of embodiments 6 to 68, wherein the molar ratio of peptide P_{b} to biopolymer scaffold in the composition is from 2:1 to 100:1, preferably from 3:1 to 90:1, more preferably from 4:1 to 80:1, even more preferably from 5:1 to 70:1, yet even more preferably from 6:1 to 60:1, especially from 7:1 to 50:1 or even from 8:10 to 40:1.

[0311] Embodiment 70. The pharmaceutical composition of any one of embodiments 65 to 69 for use in therapy, preferably therapy of a neoplasm such as a benign neoplasm, an in situ neoplasm or an malignant neoplasm, especially therapy of a solid tumor or a hematological malignancy.

[0312] Embodiment 71. The pharmaceutical composition for use according to embodiment 70, for use in increasing efficacy of an oncolytic virus or oncolytic VLP in an individual, preferably wherein the pharmaceutical composition is administered to the individual prior to or concurrently with (systemic or local, preferably systemic) administration of the oncolytic virus or oncolytic VLP (based on the oncolytic virus) and/or preferably wherein the titer of an antibody specific for the oncolytic virus or oncolytic VLP (and preferably also for the compound) is determined after administration of the pharmaceutical composition and prior to (systemic or local, preferably systemic) administration of the virus or VLP, especially wherein the virus or VLP is only administered if the titer is below a threshold.

[0313] Embodiment 72. The pharmaceutical composition for use according to embodiment 70 or 71, wherein the administration of the pharmaceutical composition is followed by (systemic or local, preferably systemic) administration of the oncolytic virus or oncolytic VLP (based on the oncolytic virus) within 96 hours, preferably within 72 hours or even within 60 hours, more preferably within 48 hours, even more preferably within 36 hours, yet even more preferably within 24 hours, especially within 12 hours; preferably wherein the (systemic or local, preferably systemic) administration of the oncolytic virus or oncolytic VLP occurs at least 6 hours, preferably at least 12 hours, more preferably at least 24 hours after administration of the pharmaceutical composition.

[0314] Embodiment 73. The pharmaceutical composition for use according to embodiment 70, for use in increasing efficacy of an oncolytic virus or oncolytic VLP (based on the oncolytic virus) in an individual, preferably wherein the pharmaceutical composition is administered to the individual prior to or concurrently with (systemic or local, preferably systemic) administration of the oncolytic virus or oncolytic VLP (based on the oncolytic virus).

[0315] Embodiment 74. The pharmaceutical composition for use according to embodiment 73, wherein the pharmaceutical composition is administered at least twice within a 96-hour window, preferably within a 72-hour window, more preferably within a 48-hour window, even more preferably within a 36-hour window, yet even more preferably within a 24-hour window, especially within a 18-hour window or even within a 12-hour window; preferably wherein this window is followed by (systemic or local, preferably systemic) administration of the oncolytic virus or oncolytic VLP (based on the oncolytic virus) within 96 or even within 72 hours, preferably within 60 hours, more preferably within 48 hours, even more preferably within 36 hours, yet even more preferably within 24 hours, especially within 12 hours.

[0316] Embodiment 75. The pharmaceutical composition for use according to any one of embodiments 71 to 74, wherein the individual is human.

[0317] Embodiment 76. The pharmaceutical composition for use according to any one of embodiments 70 to 75, wherein one or more antibodies are present in the individual which are specific for at least one occurrence of peptide P, or for peptide Pₐ and/or peptide P_{b}, preferably wherein said antibodies are neutralizing antibodies for said oncolytic virus.

[0318] Embodiment 77. The pharmaceutical composition for use according to any one of embodiments 70 to 76, wherein the composition is non-immunogenic in the individual.

[0319] Embodiment 78. The pharmaceutical composition for use according to any one of embodiments 70 to 77, wherein the composition is administered at a dose of 1-1000 mg, preferably 2-500 mg, more preferably 3-250 mg, even more preferably 4-100 mg, especially 5-50 mg, compound per kg body weight of the individual.

[0320] Embodiment 79. The pharmaceutical composition for use according to any one of embodiments 70 to 78, wherein the composition is administered intraperitoneally, subcutaneously, intramuscularly or intravenously.

[0321] Embodiment 80. A method of (transiently) sequestering (or depleting) one or more antibodies present in an individual, comprising obtaining a pharmaceutical composition as defined in any one of embodiments 65 to 69, wherein the composition is non-immunogenic in the individual and wherein the one or more antibodies present in the individual are specific for at least one occurrence of P, or for peptide Pₐ and/or peptide P_{b}; and administering the pharmaceutical composition to the individual.

[0322] Embodiment 81. The method of embodiment 80, wherein the individual is a human or non-human animal, preferably a non-human primate, a sheep, a pig, a dog or a rodent, in particular a mouse.

[0323] Embodiment 82. The method of embodiments 80 or 81, wherein the biopolymer scaffold is autologous with respect to the individual, preferably wherein the biopolymer scaffold is an autologous protein.

[0324] Embodiment 83. The method of any one of embodiments 80 to 82, wherein the individual is (systemically or locally, preferably systemically) administered a anti-neoplastic composition comprising an oncolytic virus prior to, concurrent with and/or subsequent to said administering of the pharmaceutical composition.

[0325] Embodiment 84. The method of any one of embodiments 80 to 83, wherein the individual is a non-human animal.

[0326] Embodiment 85. The method of any one of embodiments 80 to 82, wherein the individual is (systemically or locally, preferably systemically) administered a anti-neoplastic composition comprising an oncolytic virus and wherein the one or more antibodies present in the individual are specific for said oncolytic virus, preferably wherein said administering of the anti-neoplastic composition is prior to, concurrent with and/or subsequent to said administering of the pharmaceutical composition.

[0327] Embodiment 86. The method of embodiment 85, wherein the oncolytic virus contains genetic material, preferably recombinant genetic material, and/or a transgenic oncolytic payload.

[0328] Embodiment 87. The compound, composition or method of any one of embodiments 1 to 86, wherein the (human) individual has a neoplasm, preferably wherein the neoplasm is a benign neoplasm, an in situ neoplasm or a malignant neoplasm, especially a solid tumor or a hematological malignancy; in particular wherein the individual has a solid tumor preferably selected from the group of brain cancers, breast cancers, colon cancers, esophageal cancers, prostate cancers, bladder cancer, kidney cancers, endometrial cancers, thyroid cancers, gastric cancers, liver cancers, lung cancers, pancreatic cancers, uterine cancers, tracheal cancers, testicular cancers, cervical cancers, head and neck cancers, skin cancers, bone cancers, pancreatic cancers and ovarian cancers, or a hematological malignancy preferably selected from the group of leukemias, lymphomas and multiple myelomas.

[0329] Embodiment 88. The method of any one of embodiments 80 to 87, wherein the composition is administered intraperitoneally, subcutaneously, intramuscularly or intravenously.

[0330] Embodiment 89. A anti-neoplastic composition, comprising the compound of any one of embodiments 1 to 64 and further comprising the oncolytic virus (typically wherein the oncolytic virus contains genetic material) or oncolytic VLP (based on the oncolytic virus) and optionally at least one pharmaceutically acceptable excipient; preferably wherein the oncolytic virus comprises a peptide fragment with a sequence length of 6-13 amino acids, preferably 7-11 amino acids, more preferably 7-9 amino acids, and wherein the sequence of at least one occurrence of peptide P, or peptide Pₐ and/or peptide P_{b}, of the compound is at least 70% identical, preferably at least 75% identical, more preferably at least 80% identical, yet more preferably at least 85% identical, even more preferably at least 90% identical, yet even more preferably at least 95% identical, especially completely identical to the sequence of said peptide fragment.

[0331] Embodiment 90. The anti-neoplastic composition of embodiment 89, wherein the oncolytic virus is an AdV or an AAV or a measles virus, or a Herpes simplex virus (HSV), a poxvirus such as Vaccinia virus, a reovirus, a Newcastle disease virus (NVD), a rhabdovirus, a coxsackievirus, a lentivirus, an alphavirus such as Semliki Forest virus, a vesicular stomatitis virus (VSS), a myxoma virus (MYXV), a mengovirus, a bovine viral diarrhea virus (BVDV), a chimeric oncolytic virus, a picornavirus, a parvovirus, or a flavivirus, or an oncolytic VLP thereof.

[0332] Embodiment 91. The anti-neoplastic composition of embodiment 89 or 90, wherein the oncolytic virus is an AdV or an AAV or a measles virus, or an oncolytic VLP thereof.

[0333] Embodiment 92. The anti-neoplastic composition of any one of embodiments 89 to 90, wherein the composition is prepared for intravenous administration.

[0334] Embodiment 93. The pharmaceutical composition of any one of embodiments 89 to 92, wherein the composition is an aqueous solution.

[0335] Embodiment 94. The pharmaceutical composition of any one of embodiments 89 to 93 for use in inhibition of an immune reaction, preferably an antibody-mediated immune reaction, against the active agent.

[0336] Embodiment 95. The pharmaceutical composition for use according to embodiment 94, wherein the composition is non-immunogenic in the individual.

[0337] Embodiment 96. A method of inhibiting a (humoral) immune reaction to a treatment with an anti-neoplastic composition (comprising the oncolytic virus or oncolytic VLP) in an individual in need of treatment with the anti-neoplastic composition, comprising
[0338] obtaining a pharmaceutical composition as defined in any one of embodiments 89 to 95; wherein the compound of the pharmaceutical composition is non-immunogenic in the individual, and
[0339] administering the pharmaceutical composition to the individual.

[0340] Embodiment 97. The method of embodiment 96, wherein the individual is human.

[0341] Embodiment 98. The method of embodiment 96 or 97, wherein the biopolymer scaffold is autologous with respect to the individual, preferably wherein the biopolymer scaffold is an autologous protein.

[0342] Embodiment 99. The method of any one of embodiments 96 to 98, wherein the composition is administered intraperitoneally, subcutaneously, intramuscularly or intravenously.

[0343] Embodiment 100. A peptide with a sequence length of 6 to 50 amino acids, more preferably 6 to 25 amino acids, even more preferably 6 to 20 amino acids, yet more preferably 6 to 13 amino acids, wherein the peptide comprises a sequence of at least 4 or at least 5 or at least 6, preferably at least 7, more preferably at least 8, even more preferably at least 9, yet even more preferably at least 10 consecutive amino acids selected from:
[0344] the group of AdV sequences ETGPPTVPFLTPPF (SEQ ID NO: 32), HDSKLSIATQGPL (SEQ ID NO: 33), LNLRLGQGPLFINSAHNLDINY (SEQ ID NO: 34), VDPMDEPTLLYVLFEVEDVV (SEQ ID NO: 35), MKRARPSEDTENPVYPYD (SEQ ID NO: 36), ISGTVQSAHLIIRED (SEQ ID NO: 37), LGQGPLFINSAHNLDINYNKGLYLF (SEQ ID NO: 38), SYPFDAQNOLNLRLGQGPLFIN (SEQ ID NO: 39), GDTTPSAYSMSFSWDWSGHNYIN (SEQ ID NO: 40), VLLNNSFLDPEYWNFRN (SEQ ID NO: 41), HNYINEIFATSSYTESYIA (SEQ ID NO: 42), DEAATALEINLEEEDDDNEDEVDEQAEQQKTH (SEQ ID NO: 43), INLEEEDDDNEDEVDEQAEQ (SEQ ID NO: 44), DNEDEVDEQAEQQKTHVF (SEQ ID NO: 45), EWDEAATALEINLEE (SEQ ID NO: 46), PKVVLYSEDVDIETPDTHISYMP (SEQ ID NO: 47), YIPESYKDRMYSFERNF (SEQ ID NO: 48), DSIGDRTRYFSMW (SEQ ID NO: 49), SYKDRMYSFFRNE (SEQ ID NO: 50), and FLVOMLANYNIGYQGFY (SEQ ID NO: 51), or
[0345] the group of AAV sequences WONRDVYLOGPIWAKIP (SEQ ID NO: 52), DNTYFGYSTPWGYFDFNRFHC (SEQ ID NO: 53), MANQAKNWLPGPCY (SEQ ID NO: 54), LPYVLGSAHQGCLPPFP (SEQ ID NO: 55), NGSQAVGRSSFYCLEYF (SEQ ID NO: 56), PLIDQYLYYL (SEQ ID NO: 57), EERFFPSNGILIF (SEQ ID NO: 58), ADGVGSSSGNWHC (SEQ ID NO: 59), SEQ ID NOs: 383-1891 (see Table 1)-preferably group III of Table 1, more preferably group II of Table 1, especially group I of Table 1—and SEQ ID NOs: 1892-2063 (see Table 2)-preferably group I of Table 2—and sequences of group II or III of Table 3 (in particular SEQ ID NOs: 2064-2103), more preferably sequences of group I of Table 3, or the group of sequences of Table 4, in particular the group of sequences identified by SEQ ID NOs: 2104-2190, or the group of sequences of Table 5,
[0346] optionally wherein at most three, preferably at most two, most preferably at least one amino acid of the sequence is independently substituted by any other amino acid;
[0347] preferably wherein the peptide is a peptide as defined in embodiment 31, 32 or 33.

[0348] Embodiment 101. A method for detecting and/or quantifying oncolytic virus neutralizing antibodies in a biological sample comprising the steps of
[0349] bringing the sample into contact with the peptide of embodiment 100 or the compound of any one of embodiments 1 to 64, and
[0350] detecting the presence and/or concentration of the antibodies in the sample.

[0351] Embodiment 102. The method of embodiment 101, wherein the peptide or the compound is immobilized on a solid support, in particular a biosensor-based diagnostic device with an electrochemical, fluorescent, magnetic, electronic, gravimetric or optical biotransducer and/or wherein the peptide or the compound is coupled to a reporter or reporter fragment, such as a reporter fragment suitable for a PCA.

[0352] Embodiment 103. The method of embodiment 101 or 102, wherein the method is a sandwich assay, preferably an enzyme-linked immunosorbent assay (ELISA).

[0353] Embodiment 104. The method of any one of embodiments 101 to 103, wherein the sample is obtained from a mammal, preferably a human; preferably wherein the mammal (human) has a neoplasm, more preferably wherein the neoplasm is a benign neoplasm, an in situ neoplasm or a malignant neoplasm, even more preferably a solid tumor or a hematological malignancy, especially wherein the mammal has a solid tumor preferably selected from the group of brain cancers, breast cancers, colon cancers, esophageal cancers, prostate cancers, bladder cancer, kidney cancers, endometrial cancers, thyroid cancers, gastric cancers, liver cancers, lung cancers, pancreatic cancers, uterine cancers, tracheal cancers, testicular cancers, cervical cancers, head and neck cancers, skin cancers, bone cancers, pancreatic cancers and ovarian cancers, or a hematological malignancy preferably selected from the group of leukemias, lymphomas and multiple myelomas; in particular wherein the mammal (human) has been selected to undergo therapy with an oncolytic virus or oncolytic VLP or is undergoing therapy with an oncolytic virus or oncolytic VLP.

[0354] Embodiment 105. The method of any one of embodiment 101 to 104, wherein the sample is a blood sample, preferably whole blood, serum, or plasma.

[0355] Embodiment 106. Use of the peptide according to embodiment 100 or the compound of any one of embodiments 1 to 64 in an enzyme-linked immunosorbent assay (ELISA), preferably for a method as defined in any one of embodiments 101 to 105.

[0356] Embodiment 107. Diagnostic device comprising the peptide according to embodiment 100 or the compound of any one of embodiments 1 to 64 wherein the peptide or the compound is immobilized on a solid support and/or wherein the peptide or the compound is coupled to a reporter or reporter fragment, such as a reporter fragment suitable for a PCA.

[0357] Embodiment 108. Diagnostic device according to embodiment 107, wherein the solid support is an ELISA plate or a surface plasmon resonance chip.

[0358] Embodiment 109. Diagnostic device according to embodiment 107, wherein the diagnostic device is a lateral flow assay device or a biosensor-based diagnostic device with an electrochemical, fluorescent, magnetic, electronic, gravimetric or optical biotransducer.

[0359] Embodiment 110. A diagnostic kit comprising a peptide according to embodiment 100 or the compound of any one of embodiments 1 to 64, preferably diagnostic device according to any one of embodiment 107 to 109, and preferably one or more selected from the group of a buffer, a reagent, instructions.

[0360] Embodiment 111. An apheresis device comprising the peptide according to embodiment 100, preferably immobilized on a solid carrier.

[0361] Embodiment 112. The apheresis device according to embodiment 111, wherein the solid carrier is capable of being contacted with blood or plasma flow.

[0362] Embodiment 113. The apheresis device according to embodiment 111 or 112, wherein the solid carrier comprises the compound according to any one of embodiments 1 to 64.

[0363] Embodiment 114. The apheresis device according to any one of embodiment 111 to 113, wherein the solid carrier is a sterile and pyrogen-free column.

[0364] Embodiment 115. The apheresis device according to any one of embodiments 111 to 114, wherein the apheresis device comprises at least two, preferably at least three, more preferably at least four different peptides according to embodiment 100.

[0365] The present invention is further illustrated by the following figures and examples, without being restricted thereto.

[0366] FIG. 1: Schematic illustration of the inventive oncolytic regimen. The antibody lowering effect of SADCs is transient in an organism with pre-existing immunity, allowing for a therapeutic window for oncolytic virus administration. OV: oncolytic virus.

[0367] FIG. 2: Transient selective lowering of pre-existing antibody titers. Rapid antibody titer lowering at 24 hrs and 48 hrs after i.v. SADC administration was observed. Titer recovery starts after 48 hrs post SADC administration.

[0368] FIG. 3: Blood clearance of an anti-CD163-antibody-based biopolymer scaffold. In a mouse model, mAb E10B10 (specific for murine CD163) is much more rapidly cleared from circulation than mAb Mac2-158 (specific for human CD163 but not for murine CD163, thus serving as negative control in this experiment).

[0369] FIG. 4: AdV capsid protein sequences for use in the present invention. Databases accession numbers (in particular UniProt or GenBank accession numbers) are listed.

[0370] FIG. 5: AAV capsid protein sequences for use in the present invention. Databases accession numbers (in particular UniProt or GenBank accession numbers are listed), as well as references to sequences in patent publications.

### EXAMPLES

### Example 1: Transient Selective Lowering of Pre-Existing Antibody Titers

[0371] An SADC with a transferrin biopolymer scaffold conjugated to model peptides (PAVIMGNWENHWI; SEQ ID NO: 2226) was used to test the antibody-lowering effect in a mouse model (actively immunized using peptide PAVIMGNWENHWI coupled to keyhole limpet hemocyanin (KLH) as immunogen). FIG. 2 shows the binding signal intensities (arbitrary units) against peptide PAVIMGNWENHWI when detecting specific IgG levels by peptide arrays. Rapid titer lowering at 24 hrs and 48 hrs after i.v. SADC administration was observed. Titer recovery starts after 48 hrs post SADC administration. In conclusion, the antibody lowering effect of SADCs is transient in an organism with pre-existing immunity.

[0372] As explained above, antibodies against oncolytic viruses support their beneficial effect against cancer cells. However, these antibodies may at the same time inhibit oncolytic virus delivery, thereby reducing target access and therapeutic efficacy. In view of the observations in this example, it is thus especially beneficial to administer the oncolytic virus to a cancer patient in a time window from about 12 hours post SADC administration to about 60 hours post SADC administration (especially in larger mammals such as humans, the window may be extended e.g. up until 96 hours post SADC administration). Typically, the titer of a nAb against oncolytic viruses is determined before administering the oncolytic virus (or VLP) and the oncolytic virus (or VLP) is only administered if the titer is below a certain threshold (e.g. below 50% or 60% or 70% of the original titer). Otherwise, administration of the SADC may be repeated to further lower the titer.

[0373] A schematic illustration of the inventive oncolytic regimen is also shown in FIG. 1.

### Example 2: Generation of Mimotope-Based SADCs

[0374] mAb 4D2 is a mouse IgG2a mAb targeting the adenovirus fiber epitope peptide (NCBI Reference Sequence: AP 000226.1). It represents a prototype neutralizing antibody that was generated from UV irradiated Ad2 virus (Krasnykh et al, 1998).

[0375] Linear and circular peptides derived from wild-type or modified peptide amino acid sequences can be used for the construction of specific SADCs for the selective removal of neutralizing antibodies against viral vectors. In case of a particular epitope, linear peptides or constrained peptides such as cyclopeptides containing portions of an epitope or variants thereof, where for example, one or several amino acids have been substituted or chemically modified in order to improve affinity to an antibody (mimotopes), can be used for constructing SADCs. A peptide screen can be performed with the aim of identifying peptides with optimized affinity to neutralizing antibodies. The flexibility of structural or chemical peptide modification provided a solution to minimize the risk of immunogenicity, in particular of binding of the peptide to HLA and thus the risk of unwanted immune stimulation.

[0376] Therefore, wild-type as well as modified linear and circular peptide sequences are derived from an epitope of a viral capsid protein as disclosed herein, e.g. the epitopic sequence LNLRLGQGPLFINSAHNLDINY (SEQ ID NO: 34) of mAb 4D2 found in the course of the present invention (see example further below). Peptides of various length and positions are systematically permutated by amino acid substitutions and synthesized on a peptide array. This allows screening of 60000 circular and linear wild-type and mimotope peptides derived from these sequences. The peptide arrays are incubated with mAb 4D2. This antibody is therefore used to screen the 60000 peptides and 100 circular and 100 linear peptide hits are selected based on their relative binding strength to the antibody. Of these 200 peptides, 51 sequences are identical between the circular and the linear peptide group. All of the best peptides identified have at least one amino acid substitution when aligned to the original sequences, respectively and are therefore regarded as mimotopes. Also, higher binding strengths can be achieved with circularized peptides.

[0377] These newly identified peptides, preferentially those with high relative binding values, are used to generate SADCs for increasing efficacy of AdV-based oncolytic viruses.

### Example 3: SADCs to Transiently Reduce Antibodies Against Measles Virus

[0378] Three SADCs are provided to reduce anti-measles virus antibodies for oncolytic therapy with measles virus (see also Example 15 for the peptides used):
[0379] (a) SADC-a with Mac2-158 (as disclosed in WO 2011/039510 A2) as biopolymer scaffold and at least two peptides with the sequence SITIPYQGSG (SEQ ID NO: 2227) covalently bound to the scaffold,
[0380] (b) SADC-b with human transferrin as biopolymer scaffold and at least two peptides with the sequence PEWAPLKDNRI (SEQ ID NO: 2228) covalently bound to the scaffold, and
[0381] (c) SADC-c with human albumin as biopolymer scaffold and at least two peptides with the sequence GGHITHSGMEGMG (SEQ ID NO: 2229) covalently bound to the scaffold.

[0382] These SADCs are administered intravenously to an individual with cancer who will undergo oncolytic therapy with a measles virus in order to increase efficiency of the oncolytic therapy. 24 hours after administration of the SADCs, the oncolytic measles virus is administered.

### Example 4: In-Vivo Function of Anti-CD163-Antibody-Based SADC Biopolymer Scaffold

[0383] Rapid in vivo blood clearance of anti-mouse-CD163 mAb E10B10 (as disclosed in WO 2011/039510 A2). mAb E10B10 was resynthesized with a mouse IgG2a backbone. 50 μg mAb E10B10 and Mac2-158 (human-specific anti-CD163 mAb as disclosed in WO 2011/039510 A2, used as negative control in this example since it does not bind to mouse CD163) were injected i.v. into mice and measured after 12, 24, 36, 48, 72, 96 hours in an ELISA to determine the blood clearance.

[0384] mAb E10B10 was much more rapidly cleared from circulation than control mAb Mac2-158 was, as shown in FIG. 3, since E10B10 binds to the mouse CD163 whereas Mac2-158 is human-specific, although both were expressed as mouse IgG2a isotypes for direct comparison.

[0385] In conclusion, anti-CD163 antibodies are highly suitable as SADC scaffold because of their clearance profile. SADCs with such scaffolds will rapidly clear undesirable antibodies from circulation.

[0386] Detailed methods: 50 μg of biotinylated monoclonal antibodies E10B10 and biotinylated Mac2-158 were injected i.v. into mice and measured after 12, 24, 36, 48, 72, 96 hours to determine the clearance by ELISA: Streptavidin plates were incubated with plasma samples diluted in PBS+0.1% BSA+0.1% Tween20 for 1 h at room temperature (50 μl/well). After washing (3× with PBS+0.1% Tween20), bound biotinylated antibodies were detected with anti-mouse IgG+IgM-HRP antibody at a 1:1000 dilution. After washing, TMB substrate was added and development of the substrate was stopped with TMB Stop Solution. The signal at OD450 nm was read. The EC50 values were calculated by non-linear regression using 4 parametric curve fitting with constrained curves and least squares regression. EC50 values at time-point T12 (this was the first measured time-point after antibody injection) was set at 100%, all other EC50 values were compared to the levels at T12.

### Example 5: Epitope Mapping of Anti-CD163 mAbs

[0387] mAb E10B10 provides CD163-mediated, accelerated in vivo clearance from blood in mice (see example 11). The epitope of this antibody was fine mapped using circular peptide arrays, whereby the peptides were derived from mouse CD163. As a result, a peptide cluster that is recognized by mAb E10B10 was identified (see example 13).

[0388] The same epitope mapping procedure using circularized peptides was performed with mAb Mac2-158 (as disclosed in WO 2011/039510 A2). Epitope mapping results for mAb Mac2-158 yielded two peptide clusters (see example 13) which allowed further demarcation of CD163 epitope regions that are especially relevant to internalization of ligands and antibodies that bind to the receptor.

[0389] These newly characterized epitopes for Mac2-158 and E10B10 thus revealed three preferred binding regions for antibodies against CD163. Based on the fine epitope mapping work, linear or preferentially circular peptides are synthesized and used for the induction, production and selection of polyclonal or monoclonal antibodies or other CD163-binding SADC scaffolds that target CD163.

### Example 6: Epitope Mapping of Anti-CD163 mAbs

[0390] Peptides aligned to SRCR domain 1 of human CD163 were selected from the top 20 peptide hits of mAb Mac2-158 circular epitope mapping peptides and the most preferred sequences were selected from two peptide alignment clusters at the N-terminus and at the C-terminus of SRCR-1 of human CD163. As a result, the following sequences (as well as motifs derived therefrom) are highly suitable epitopes anti-CD163 antibodies and fragments thereof used as SADC biopolymer scaffold:

Peptide cluster 1:

| | | |
|---|---|---|
| 04 | ----------------EWGTVCNNGWSME------- | (SEQ ID NO: 7) |
| 07 | -----CSGRVEVKVQEEW------------------ | (SEQ ID NO: 365) |
| 09 | --------------QEEWGTVCNNGWS--------- | (SEQ ID NO: 8) |
| 12 | -----------------WGTVCNNGWSMEA------ | (SEQ ID NO: 9) |
| 14 | ---------------EEWGTVCNNGWSM-------- | (SEQ ID NO: 10) |
| 18 | -------------VQEEWGTVCNNGW---------- | (SEQ ID NO: 11) |
| 19 | ----------------EWGTVCNNGW---------- | (SEQ ID NO: 12) |
| 20 | -----------------WGTVCNNGWS--------- | (SEQ ID NO: 5) |
| huCD163-domain 1-3 | DGENKCSGRVEVKVQEEWGTVCNNGWSMEAVSVICN | (SEQ ID NO: 366) |

Peptide cluster 2:

| | | |
|---|---|---|
| 01 | ------------ESALWDC-------------- | (SEQ ID NO: 15) |
| 02 | ---------RGNESALWDC-------------- | (SEQ ID NO: 16) |
| 03 | -------SCRGNESALW---------------- | (SEQ ID NO: 17) |
| 05 | ------VSCRGNESALWDC-------------- | (SEQ ID NO: 18) |
| 06 | --------------ALWDCKHDGW--------- | (SEQ ID NO. 19) |
| 08 | ----DHVSCRGNESALW---------------- | (SEQ ID NO. 20) |
| 11 | --------CRGNESALWD--------------- | (SEQ ID NO. 21) |
| 13 | -----------NESALWDCKHDGW--------- | (SEQ ID NO. 22) |
| 17 | ------------ESALWDCKHDGWG-------- | (SEQ ID NO. 23) |
| huCD163-domain1-3 | RIWMDHVSCRGNESALWDCKHDGWGKHSNCTHQ | (SEQ ID NO: 367) |

[0391] Fine epitope mapping of mAb E10B10 was performed as for Mac2-158. 1068 circular peptides (sized 7, 10 and 13 amino acids) and derived from SRCR-1 to -3 of the mouse CD163 sequence (UniProKB Q2VLH6.2) were screened with mAb E10B10 and the following top binding peptides were obtained (ranked by relative signal strength). The human CD163 sequence was aligned to this cluster of mouse CD163 sequences, revealing another highly suitable epitope:

Peptide cluster 3:

| | | |
|---|---|---|
| 01 | ---------------------VTNAPGEMKKELR--------- | (SEQ ID NO: 368) |
| 02 | ------------------ASAVTNAPGEMKK------------ | (SEQ ID NO: 369) |
| 03 | ---------------------VTNAPGEMKK------------ | (SEQ ID NO: 370) |
| 04 | ---------------------VTNAPGE--------------- | (SEQ ID NO: 371) |
| 05 | ----------------GSASAVTNAPGEM-------------- | (SEQ ID NO: 372) |
| 06 | --------------------AVTNAPGEMKKEL---------- | (SEQ ID NO: 373) |
| 07 | -----------------SASAVTNAPGEMK------------- | (SEQ ID NO: 374) |
| 08 | ---------------SGSASAVTNAPGE--------------- | (SEQ ID NO: 375) |
| 09 | --------------------AVTNAPGEMK------------- | (SEQ ID NO: 376) |
| 10 | -------------------SAVTNAPGEM-------------- | (SEQ ID NO: 377) |
| 11 | ------------------ASAVTNAPGE--------------- | (SEQ ID NO: 378) |
| 12 | -------------------SAVTNAPGEMKKE----------- | (SEQ ID NO: 379) |
| 13 | ----------------------TNAPGEMKKE----------- | (SEQ ID NO: 380) |
| mCD163 (SRCR-1, N-terminus) | VTNAPGEMKKELRLAGGENNCS | (SEQ ID NO: 75) |
| hCD163 (SRCR-1, N-terminus) | SSLGGTDKELRLVDGENKCS | (SEQ ID NO: 24) |

[0392] The human homologues of mouse peptides 01-13 from cluster 3 have the following sequences of the N-terminal portion of the mature human CD163 protein (UniProtKB: Q86VB7):

| Cluster 3 | | |
|---|---|---|
| peptides | | |
| (mouse): | human homologues: | |
| 01 | SSLGGTDKELR | (SEQ ID NO: 25) |
| 06 | SSLGGTDKEL | (SEQ ID NO: 27) |
| 12, 13 | SSLGGTDKE | (SEQ ID NO: 28) |
| 02, 03 | SSLGGTDK | (SEQ ID NO: 29) |
| 07, 09 | SSLGGTD | (SEQ ID NO: 30) |
| 05, 10 | SSLGGT | (SEQ ID NO: 31) |
| 04, 08, 11 | SSLGG | (SEQ ID NO: 26) |
| hCD163 | SSLGGTDKELRLVDGENKCS | (SEQ ID NO: 24) |
| (SRCR-1) | | |

[0393] These homologue peptides represent further highly suitable epitopes for the anti-CD163 antibody-based biopolymer scaffold.

### Example 7: Epitope Mapping of mAb 4D2 Against AdV

[0394] mAb 4D2 is a mouse IgG2a mAb targeting the adenovirus fiber epitope peptide (NCBI Reference Sequence: AP 000226.1). It represents a prototype neutralizing antibody that was generated from UV irradiated Ad2 virus (Krasnykh et al, 1998). In order to obtain cyclic antibody binding peptides from the virus neutralizing epitope, mAb 4D2 was mapped against aligned cyclic peptides derived from the fiber sequence. The sequence at amino acid positions 1 to 581 of NCBI Reference Sequence: AP 000226.1 was used as a starting sequence for designing 7mer, 10mer and 13mer cyclic peptides that were then synthesized and circularized directly on a peptide microarray and subsequently incubated with various concentrations of the antibody. The binding signal of monoclonal antibody 4D2 to the peptides yielded several binding hits that were be aligned against the sequence of the protein and subsequently clustered. The resulting clusters were designated cluster1 (length=14 amino acids), cluster2 (length=13 amino acids) and cluster3 (length=22 amino acids). Below are the aligments of the corresponding new peptides that are able to bind the mAb 4D2 paratope. The number of the peptide names corresponds to the rank of the binding signal of the antibody to the microarray (i.e. peptide 01 binds strongest, 02 second strongest, etc.). A selection of top candidate binding peptides out of the top 50 top binders was aligned against the corresponding protein sequence (first line).

| cluster1 | ETGPPTVPFLTPPF | (SEQ ID NO: 32) |
|---|---|---|
| 08 | --GPPTVPFLTP-- | (SEQ ID NO: 60) |
| 10 | ETGPPTVPFLTPP- | (SEQ ID NO: 61) |
| 21 | -TGPPTVPFLT--- | (SEQ ID NO: 62) |
| 34 | ----PTVPFLTPPF | (SEQ ID NO: 63) |
| cluster2 | HDSKLSIATQGPL | (SEQ ID NO: 64) |
| 03 | HDSKLSIATQGPL | (SEQ ID NO: 64) |
| 11 | -----SIATQGP- | (SEQ ID NO: 65) |
| cluster3 | LNLRLGQGPLFINSAHNLDINY | (SEQ ID NO: 34) |
| 02 | -NLRLGQGPLE----------- | (SEQ ID NO: 66) |
| 12 | ------QGPLFINSAH------ | (SEQ ID NO: 67) |
| 13 | --------PLFINSAHNLD--- | (SEQ ID NO: 68) |
| 15 | ----LGQGPLF----------- | (SEQ ID NO: 69) |
| 17 | LNLRLGQGPL------------ | (SEQ ID NO: 70) |
| 19 | -----GQGPLFI---------- | (SEQ ID NO: 71) |
| 29 | -NLRLGQGPLFINS-------- | (SEQ ID NO: 72) |
| 32 | ---------LFINSAHNLDINY | (SEQ ID NO: 73) |
| 33 | ----------FINSAHNLDI-- | (SEQ ID NO: 74) |
| 37 | --LRLGQGPLFI---------- | (SEQ ID NO: 75) |
| 39 | -------GPLFINSAHN----- | (SEQ ID NO: 76) |

[0395] The above peptides/sequences are highly suitable as peptides for SADCs which reduce neutralization of AdV vectors.

### Example 8: Epitope Mapping of Monoclonal Antibody 9C12 Against AdV

[0396] Monoclonal antibody 9C12 (alias mAB TC31-9C12·C9-s) was generated by immunizing mice with the hexon protein (Uniprot ID: P04133 which corresponds to GenBank: BAG48782.1). This neutralizing antibody is directed against the hexon protein and the neutralizing activity of this antibody was demonstrated by Varghese (Varghese et al, 2004). In brief, diluted antibody was incubated with GFP-expressing replication-defective Ad vector and subsequently added to Hela cells followed by fluorescence readout. In order to map a region from which paratope binding peptides could be derived, the sequence at amino acid positions 1 to 952 of GenBank: BAG48782.1 was used as a starting sequence for designing cyclic 7mer, 10mer and 13mer peptides that were then synthesized and circularized on a peptide microarray, and subsequently incubated with various concentrations of the antibody. The binding signal of mAb 9C12 to the peptides yielded several candidates that could be aligned and clustered against the protein. An epitopic cluster region of 20 amino acids was identified from which paratope binding peptides can be preferentially derived. Below are the aligments of the corresponding peptide hits from this screen. The number of the peptide names corresponds to the ranked binding signal obtained from the microarray (i.e. peptide 01 binds strongest, 02 second strongest, etc.). Cyclic peptides were selected out of up to 50 top binders in this experiment.

| cluster1 | VDPMDEPTLLYVLFEVEDVV | (SEQ ID NO: 35) |
|---|---|---|
| 01 | ----DEPTLLYVLFEVE--- | (SEQ ID NO: 77) |
| 02 | -------TLLYVLFEVE--- | (SEQ ID NO: 78) |
| 03 | ----DEPTLLYVLF------ | (SEQ ID NO: 79) |
| 04 | -------TLLYVLFEVEDVV | (SEQ ID NO: 80) |
| 05 | -------TLLYVLF------ | (SEQ ID NO: 81) |
| 06 | ---MDEPTLLYVLFEV---- | (SEQ ID NO: 82) |
| 07 | -----EPTLLYVLFE----- | (SEQ ID NO: 83) |
| 08 | -DPMDEPTLLYVLF------ | (SEQ ID NO: 84) |
| 09 | --------LLYVLFEVED-- | (SEQ ID NO: 85) |
| 10 | ----------YVLFEVEDVV | (SEQ ID NO: 86) |
| 11 | ------PTLLYVLFEV---- | (SEQ ID NO: 87) |
| 12 | ------PTLLYVLFEVEDV- | (SEQ ID NO: 88) |
| 13 | ---------LYVLFEVEDV- | (SEQ ID NO: 89) |
| 14 | -----EPTLLYVLFEVED-- | (SEQ ID NO: 90) |
| 15 | ---------LYVLFEV---- | (SEQ ID NO: 91) |
| 16 | --PMDEPTLLYVLFE----- | (SEQ ID NO: 92) |
| 17 | --------LLYVLFE----- | (SEQ ID NO: 93) |
| 18 | VDPMDEPTLLYVL------- | (SEQ ID NO: 94) |
| 19 | -----------YVLFEVF-- | (SEQ ID NO: 95) |
| 20 | ------PTLLYVL------- | (SEQ ID NO: 96) |

[0397] The above peptides/sequences are highly suitable as peptides for SADCs which reduce neutralization of AdV vectors.

### Example 9: Epitope Mapping of Polyclonal Antibody Ab6982 Against AdV

[0398] Polyclonal antibody ab6982 (Abcam) was generated by immunizing rabbits with purified AdV. It reacts with all capsid proteins of Ad5 including hexon, fiber and penton. It was shown that the antibody neutralizes Ad5 infection in a bioassay at 1000 adenovirus 5 particles/ml, a 50% inactivation of the adenovirus can be achieved at a 1/25,000 dilution of the antibody. In order to identify epitopic regions that could contain peptides for ab6982 paratope binding, the antibody was mapped against the sequences of fiber (NCBI Reference Sequence: AP 000226.1) and hexon protein (GenBank: BAG48782.1). The fiber-sequence at amino acid positions 1 to 581 of (NCBI Reference Sequence: AP 000226.1), and the hexon-sequene (GenBank: BAG48782.1) at amino acid positions 1 to 952 were used as a starting sequence for designing 7mer, 10mer and 13mer cyclic peptides synthesized on a peptid array. The binding signal of this antibody to the array yielded several peptides that were aligned and clustered against the sequence of the protein. The peptide clusters were named cluster1-7 (fiber protein) and clusters8-16 (hexon protein) according to their ranked order of cyclic peptide hits (i.e. cluster contains the strongest binders, cluster2 the second strongest etc.). Below are the aligments of the corresponding peptides that bind to polyclonal antibody ab6982. The number of the peptide names corresponds to the antibody binding signal ranking from the microarray experiment, the numbers of the clusters 1-7 and clusters 8-16 are ranked by the content of top binding peptides, respectively.

| Cluster1 | MKRARPSEDTFNPVYPYD | (SEQ ID NO: 36) |
|---|---|---|
| 001 | MKRARPSEDTF------- | (SEQ ID NO: 97) |
| 002 | -KRARPSEDTF------- | (SEQ ID NO: 98) |
| 003 | MKRARPSEDT-------- | (SEQ ID NO: 99) |
| 005 | MKRARPSEDTFN------ | (SEQ ID NO: 100) |
| 010 | ---ARPSEDTFNP----- | (SEQ ID NO: 101) |
| 019 | --RARPSEDTFN------ | (SEQ ID NO: 102) |
| 024 | ----RPSEDTF------- | (SEQ ID NO: 103) |
| 035 | MKRARPSEDTFNP----- | (SEQ ID NO: 104) |
| 040 | --RARPSEDTFNPVY--- | (SEQ ID NO: 105) |
| 041 | ---ARPSEDT-------- | (SEQ ID NO: 106) |
| 052 | -------EDTFNPVYPY- | (SEQ ID NO: 107) |
| 061 | ----RPSEDTFNPVYPY- | (SEQ ID NO: 108) |
| 129 | -KRARPSEDTFNPV---- | (SEQ ID NO: 109) |
| 130 | --------DTFNPVY--- | (SEQ ID NO: 110) |
| 150 | ----RPSEDTFNPV---- | (SEQ ID NO: 111) |
| 153 | -----PSEDTFNPVY--- | (SEQ ID NO: 112) |
| 163 | --------DTFNPVYPYD | (SEQ ID NO: 113) |
| Cluster2 | ISGTVQSAHLIIRFD | (SEQ ID NO: 37) |
| 004 | ----VQSAHLIIRF- | (SEQ ID NO: 114) |
| 006 | -------AHLIIRF- | (SEQ ID NO: 115) |
| 015 | -SGTVQSAHLIIRF- | (SEQ ID NO: 116) |
| 056 | ---TVQSAHLIIR-- | (SEQ ID NO: 117) |
| 060 | --------HLIIRFD | (SEQ ID NO: 118) |
| 065 | ------SAHLIIR-- | (SEQ ID NO: 119) |
| 076 | -----QSAHLIIRFD | (SEQ ID NO: 120) |
| 085 | ISGTVQSAHLIIR-- | (SEQ ID NO: 121) |
| 118 | --GTVQSAHLII--- | (SEQ ID NO: 122) |
| 123 | --GTVQSARLIIRFD | (SEQ ID NO: 123) |
| 126 | -----QSAHLII--- | (SEQ ID NO: 124) |
| Cluster3 | LGQGPLFINSAHNLDINYNKGLYLF | (SEQ ID NO: 38) |
| 009 | -----------HNLDINY------- | (SEQ ID NO: 125) |
| 011 | -----LFINSAHNLDINY------- | (SEQ ID NO: 126) |
| 012 | ------------NLDINYNKGLYLF | (SEQ ID NO: 127) |
| 013 | -------FVSPNG------------ | (SEQ ID NO: 128) |
| 016 | ----------------NYINEIF-- | (SEQ ID NO: 129) |
| 020 | ------------------NKGLYLF | (SEQ ID NO: 130) |
| 021 | ---------------INYNKGLYLF | (SEQ ID NO: 131) |
| 023 | --------NSAHNLDINY------- | (SEQ ID NO: 132) |
| 032 | ------WDWSGH----NYINEIF-- | (SEQ ID NO: 133) |
| 039 | ---------SGH----NYINEIF-- | (SEQ ID NO: 134) |
| 044 | --LGTGLSF---------------- | (SEQ ID NO: 135) |
| 047 | PELTPPF------------------ | (SEQ ID NO: 136) |
| Cluster4 | SYPFDAQNQLNLRLGQGPLFIN | (SEQ ID NO: 39) |
| 027 | -------------LGQGPLF-- | (SEQ ID NO: 137) |
| 029 | ----------NLRLGQGPLF-- | (SEQ ID NO: 138) |
| 030 | -------NQLNLRLGQGPLF-- | (SEQ ID NO: 139) |
| 058 | --------------GQGPLFI- | (SEQ ID NO: 140) |
| 059 | --------QLNLRLGQGPLFI- | (SEQ ID NO: 141) |
| 062 | SYPFDAQNQLNLR--------- | (SEQ ID NO: 142) |
| 066 | -YPFDAQNQLNLRL-------- | (SEQ ID NO: 143) |
| 070 | -----------LRLGQGPLFI- | (SEQ ID NO: 144) |
| 072 | -------NQLNLRL-------- | (SEQ ID NO: 145) |
| 073 | ---FDAQNQLNLR--------- | (SEQ ID NO: 146) |
| 082 | ------QNQLNLR--------- | (SEQ ID NO: 147) |
| 093 | ---------------QGPLFIN | (SEQ ID NO: 148) |
| 102 | --PFDAQNQLNLRLG------- | (SEQ ID NO: 149) |
| 112 | ----DAQNQLNLRL-------- | (SEQ ID NO: 150) |
| 117 | ------------RLGQGPLFIN | (SEQ ID NO: 151) |
| 136 | --------QLNLRLG------- | (SEQ ID NO: 152) |
| 147 | ---FDAQNQLNLRLGQ------ | (SEQ ID NO: 153) |
| 148 | ---------LNLRLGQGPLFIN | (SEQ ID NO: 154) |
| 169 | -----AQNQLNLRLG------- | (SEQ ID NO: 155) |
| 172 | -----AQNQLNI---------- | (SEQ ID NO: 156) |
| 173 | ---------LNLRLGQ------ | (SEQ ID NO: 157) |
| 178 | SYPFDAQNQL------------ | (SEQ ID NO: 158) |
| 197 | --PFDAQNQLNL---------- | (SEQ ID NO: 159) |
| Cluster5 | GDTTPSAYSMSFSWDWSGHNYIN | (SEQ ID NO: 40) |
| 008 | -------YSMSFSW--------- | (SEQ ID NO: 160) |
| 014 | ---TPSAYSMSFSWDW------- | (SEQ ID NO: 161) |
| 022 | ---------MSFSWDW------- | (SEQ ID NO: 162) |
| 028 | ----PSAYSMSFSW--------- | (SEQ ID NO: 163) |
| 049 | -DTTPSAYSMSFSW--------- | (SEQ ID NO: 164) |
| 078 | --TTPSAYSMSF----------- | (SEQ ID NO: 165) |
| 079 | -------YSMSPSWDWS------ | (SEQ ID NO: 166) |
| 091 | TGDTTPSAYSMSF---------- | (SEQ ID NO: 167) |
| 095 | ------------FSWDWSGHNY- | (SEQ ID NO: 168) |
| 100 | -----------SFSWDWS----- | (SEQ ID NO: 169) |
| 108 | ------SAYSMSF---------- | (SEQ ID NO: 170) |
| 134 | -----------SFSWDWSGHN-- | (SEQ ID NO: 171) |
| 143 | ------SAYSMSFSWD------- | (SEQ ID NO: 172) |
| 144 | ---------SMSFSWD------- | (SEQ ID NO: 173) |
| 149 | -------------SWDWSGHNYI | (SEQ ID NO: 174) |
| 167 | -------AYSMSFS--------- | (SEQ ID NO: 175) |
| 176 | ---------SMSFSWDWSGHNY- | (SEQ ID NO: 176) |
| 186 | ------------FSWDWSG---- | (SEQ ID NO: 177) |
| 193 | -------------SWDWSGH--- | (SEQ ID NO: 178) |
| Cluster6 | VLLNNSFLDPEYWNERN | (SEQ ID NO: 41) |
| 017 | ------FLDPEYWNER- | (SEQ ID NO: 179) |
| 018 | -----SFLDPEYWNF-- | (SEQ ID NO: 180) |
| 031 | ---------PEYWNFR- | (SEQ ID NO: 181) |
| 033 | --LNNSFLDPEYWNE-- | (SEQ ID NO: 182) |
| 034 | ---NNSFLDPEYWNER- | (SEQ ID NO: 183) |
| 050 | ------FLDPEYW---- | (SEQ ID NO: 184) |
| 053 | --------DPEYWNE-- | (SEQ ID NO: 185) |
| 068 | ---NNSFIDPEYW---- | (SEQ ID NO: 186) |
| 088 | VLLNNSELDPEYW---- | (SEQ ID NO: 187) |
| 113 | ----------EYWNFRN | (SEQ ID NO: 188) |
| 114 | --LNNSFLDPEY----- | (SEQ ID NO: 189) |
| 155 | -------LDPEYWNERN | (SEQ ID NO: 190) |
| 180 | --LNNSFLD-------- | (SEQ ID NO: 191) |
| 187 | ----NSFLDPEYWN--- | (SEQ ID NO: 192) |
| Cluster7 | HNYINEIFATSSYTESYIA | (SEQ ID NO: 42) |
| 042 | ----------SSYTFSY-- | (SEQ ID NO: 193) |
| 043 | -------FATSSYTESY-- | (SEQ ID NO: 194) |
| 055 | --YINEIFATSSYTF---- | (SEQ ID NO: 195) |
| 064 | -----------SYTFSYI- | (SEQ ID NO: 196) |
| 080 | --------ATSSYTF---- | (SEQ ID NO: 197) |
| 089 | -----EIFATSSYTF---- | (SEQ ID NO: 198) |
| 092 | ----NEIFATSSYTESY-- | (SEQ ID NO: 199) |
| 097 | --------ATSSYTESYI- | (SEQ ID NO: 200) |
| 099 | HNYINEIFATSSY------ | (SEQ ID NO: 201) |
| 104 | ------IFATSSY------ | (SEQ ID NO: 202) |
| 110 | ---INEIFATSSY------ | (SEQ ID NO: 203) |
| 119 | -NYINEIFATSSYT----- | (SEQ ID NO: 204) |
| 168 | --YINEIFA---------- | (SEQ ID NO: 205) |
| 181 | ------------YTESYIA | (SEQ ID NO: 206) |
| 200 | -----EIFATSSYTESYI- | (SEQ ID NO: 207) |
| Cluster8 | DEAATALEINLEEEDDDNEDEVDEQAEQQKTH | (SEQ ID NO: 43) |
| 01 | -----ALEINLEEEDDDN-------------- | (SEQ ID NO: 208) |
| 02 | ---ATALEINLEEEDD---------------- | (SEQ ID NO: 209) |
| 03 | -EAATALEINLEEE------------------ | (SEQ ID NO: 210) |
| 04 | ------LEINLEE------------------- | (SEQ ID NO: 211) |
| 05 | ----TALEINLEEEDDD--------------- | (SEQ ID NO: 212) |
| 06 | -------EINLEEE------------------ | (SEQ ID NO: 213) |
| 07 | -----ALEINLEEED----------------- | (SEQ ID NO: 214) |
| 08 | ------LEINLEEEDD---------------- | (SEQ ID NO: 215) |
| 09 | ----TALEINLEEE------------------ | (SEQ ID NO: 216) |
| 11 | DEAATALEINLEE------------------- | (SEQ ID NO: 217) |
| 13 | ------LEINLEEEDDDNE | (SEQ ID NO: 218) |
| 14 | --AATALEINLEEED----------------- | (SEQ ID NO: 219) |
| 15 | -------EINLEEEDDD--------------- | (SEQ ID NO: 220) |
| 19 | ---ATALEINLEE------------------- | (SEQ ID NO: 221) |
| 23 | --------INLEEEDDDN-------------- | (SEQ ID NO: 222) |
| 27 | ---------NLEEEDDDNE------------- | (SEQ ID NO: 223) |
| 10 | -------------------DEVDEQA------ | (SEQ ID NO: 224) |
| 12 | -------------EDDDNEDEVDEQA--- | (SEQ ID NO: 225) |
| 16 | ---------------DDNEDEVDEQAEQ---- | (SEQ ID NO: 226) |
| 17 | --------------------EVDEQAE----- | (SEQ ID NO: 227) |
| 18 | ----------------DNEDEVDEQA------ | (SEQ ID NO: 228) |
| 20 | ---------------------VDEQAEQ---- | (SEQ ID NO: 229) |
| 21 | ------------------EDEVDEQAEQQKT- | (SEQ ID NO: 230) |
| 22 | ------------------EDEVDEQAEQ---- | (SEQ ID NO: 231) |
| 24 | -------------------DEVDEQAEQQKTH | (SEQ ID NO: 232) |
| 25 | -----------------NEDEVDEQAEQQK-- | (SEQ ID NO: 233) |
| 26 | -------------------DEVDEQAEQQ--- | (SEQ ID NO: 234) |
| Cluster9 | INLEEEDDDNEDEVDEQAEQ | (SEQ ID NO: 44) |
| 028 | EINLEEEDDDNED------- | (SEQ ID NO: 235) |
| 029 | --NLEEEDDDNEDEV----- | (SEQ ID NO; 236) |
| 032 | -INLEEED------------ | (SEQ ID NO: 237) |
| 034 | ---LEEEDDDNED------- | (SEQ ID NO: 238) |
| 035 | -INLEEEDDDNEDE------ | (SEQ ID NO: 239) |
| 037 | -------DDDNEDEVDEQAE | (SEQ ID NO: 240) |
| 053 | ---LEEEDDDNEDEVD---- | (SEQ ID NO: 241) |
| 057 | --------DDNEDEVDEQ-- | (SEQ ID NO: 242) |
| 063 | ------EDDDNED------- | (SEQ ID NO: 243) |
| 065 | --NLEEEDD----------- | (SEQ ID NO: 244) |
| 078 | --------DDNEDEV----- | (SEQ ID NO: 245) |
| 087 | -------DDDNEDEVDE--- | (SEQ ID NO; 246) |
| 096 | -------DDDNEDE------ | (SEQ ID NO: 247) |
| 097 | ----EEEDDDNEDE------ | (SEQ ID NO: 248) |
| 108 | -----EEDDDNE-------- | (SEQ ID NO: 249) |
| 121 | ------EDDDNEDEVD---- | (SEQ ID NO: 250) |
| 126 | -----------EDEVDEQ--- | (SEQ ID NO: 251) |
| 148 | -----EEDDDNEDEVDEQ--- | (SEQ ID NO: 252) |
| 185 | -----EEDDDNEDEV------ | (SEQ ID NO: 253) |
| 188 | ----EEEDDDNEDEVDE---- | (SEQ ID NO: 254) |
| Cluster10 | DNEDEVDEQAEQQKTHVF | (SEQ ID NO: 45) |
| 030 | ----EVDEQAEQQK---- | (SEQ ID NO: 255) |
| 031 | DNEDEVDEQAEQQ----- | (SEQ ID NO: 256) |
| 036 | -----VDEQAEQQKT--- | (SEQ ID NO: 257) |
| 038 | ----EVDEQAEQQKTHV- | (SEQ ID NO: 258) |
| 041 | -----VDEQAEQQKTHVE | (SEQ ID NO: 259) |
| Cluster11 | EWDEAATALEINLEE | (SEQ ID NO: 46) |
| 033 | --------ALEINLE | (SEQ ID NO: 260) |
| 042 | --WDEAATALEINLE | (SEQ ID NO: 261) |
| 043 | -----AATALEINLE | (SEQ ID NO: 262) |
| 112 | EWDEAATALEINL-- | (SEQ ID NO: 263) |
| 124 | ---EAATALEINL-- | (SEQ ID NO: 264) |
| Cluster12 | PKVVLYSEDVDIETPDTHISYMP | (SEQ ID NO: 47 |
| 039 | ----LYSEDVDIET--------- | (SEQ ID NO: 265) |
| 040 | ----LYSEDVDIETPDT------ | (SEQ ID NO: 266) |
| 044 | -KVVLYSEDVDIET--------- | (SEQ ID NO: 267) |
| 045 | -----------IETPDTH----- | (SEQ ID NO: 268) |
| 046 | ---------VDIETPDTHI---- | (SEQ ID NO: 269) |
| 047 | ---VLYSEDVDIE---------- | (SEQ ID NO: 270) |
| 048 | --------DVDIETPDTHISY-- | (SEQ ID NO: 271) |
| 049 | --VVLYSEDVDIETP-------- | (SEQ ID NO: 272) |
| 050 | ------SEDVDIETPDTHI---- | (SEQ ID NO: 273) |
| 051 | ------------ETPDTHI---- | (SEQ ID NO: 274) |
| 052 | ---VLYSEDVDIETPD------- | (SEQ ID NO: 275) |
| 054 | --------DVDIETPDTH----- | (SEQ ID NO: 276) |
| 055 | ----------DIETPDTHIS--- | (SEQ ID NO; 277) |
| 056 | -------EDVDIETPDTHIS--- | (SEQ ID NO: 278) |
| 058 | -----------IETPDTHISY-- | (SEQ ID NO: 279) |
| 059 | -----YSEDVDIETPDTH----- | (SEQ ID NO; 280) |
| 060 | ---------VDIETPDTHISYM- | (SEQ ID NO: 281) |
| 061 | PKVVLYSEDVDIE---------- | (SEQ ID NO: 282) |
| 062 | ----------DIETPDT------ | (SEQ ID NO: 283) |
| 064 | ----------DIETPDTHISYMP | (SEQ ID NO: 284) |
| 070 | -------EDVDIETPDT------ | (SEQ ID NO: 285) |
| 071 | ------------ETPDTHISYM- | (SEQ ID NO: 286) |
| 159 | -----------IETPDTHISYMP | (SEQ ID NO: 287) |
| Cluster13 | YIPESYKDRMYSFFRNF | (SEQ ID NO: 48) |
| 072 | -------DRMYSFERNF | (SEQ ID NO: 288) |
| 086 | -------DRMYSFF--- | (SEQ ID NO: 289) |
| 104 | ----------YSFFRNF | (SEQ ID NO: 290) |
| 107 | -IPESYKDRMYSFF--- | (SEQ ID NO: 291) |
| 120 | ----SYKDRMYSFF--- | (SEQ ID NO: 292) |
| 127 | ---ESYKDRMYSF---- | (SEQ ID NO: 293) |
| 143 | ------KDRMYSF---- | (SEQ ID NO: 294) |
| 152 | YIPESYKDRMYSF---- | (SEQ ID NO: 295) |
| 153 | --PESYKDRMYSFER-- | (SEQ ID NO: 296) |
| 160 | -----YKDRMYSFER-- | (SEQ ID NO: 297) |
| Cluster14 | DSIGDRTRYFSMW | (SEQ ID NO: 49) |
| 073 | ------TRYFSMW | (SEQ ID NO: 298) |
| 080 | ---GDRTRYF--- | (SEQ ID NO: 299) |
| 095 | DSIGDRTRYF--- | (SEQ ID NO: 300) |
| 100 | DSIGDRTRYFSMW | (SEQ ID NO: 301) |
| 101 | ---GDRTRYFSMW | (SEQ ID NO: 302) |
| Cluster15 | SYKDRMYSFERNF | (SEQ ID NO: 50) |
| 072 | ---DRMYSFERNF | (SEQ ID NO: 303) |
| 099 | SYKDRMYSFERNF | (SEQ ID NO: 304) |
| Cluster16 | FLVQMLANYNIGYQGFY | (SEQ ID NO: 51) |
| 106 | -------NYNIGYQGFY | (SEQ ID NO: 305) |
| 122 | ------ANYNIGYQGF- | (SEQ ID NO: 306) |
| 123 | ----MLANYNIGYQGFY | (SEQ ID NO: 307) |
| 136 | ----------IGYQGFY | (SEQ ID NO: 308) |
| 184 | FLVQMLANYNIGY---- | (SEQ ID NO: 309) |
| 187 | ---------NIGYQGF- | (SEQ ID NO: 310) |
| 190 | ---QMLANYNIGYQGF- | (SEQ ID NO: 311) |

[0399] The above peptides/sequences are highly suitable as peptides for SADCs which reduce neutralization of AdV vectors. Importantly, binding of these peptides to the paratope of unwanted antibodies can be even further improved by mutating 1, 2 or 3 amino acids in order to generate mimotopes with improved antibody binding properties.

### Example 10: Epitope Mapping of mAb ADK8 Against AAV

[0400] Monoclonal antibody ADK8 was generated by immunizing mice with AAV8 capsids. It is directed against the assembled AAV8 capsid (Sonntag et al, 2011). The neutralizing function of the antibody was previously demonstrated (Gurda et al, 2012). In brief, AAV8 was pre-incubated with ADK8 which lead to a decline in the number of virus particles present in the cytoplasm. Moreover, the binding of AAV8 to the nuclear membrane as well as the nuclear entry were abrogated following neutralization by ADK8. This suggests that ADK8 neutralization might interfere either with the cellular entry and/or the transport to the nucleus. ADK8 also cross-reacts with capsid proteins from other AAV serotypes such as AAV1, AAV3, AAV7 (Mietzsch et al, 2014) and was therefore chosen as an example from which general conclusions about the present invention can be drawn.

[0401] As for the other antibodies (see examples above), several clusters were identified, delineating regions from which preferred peptides can be deduced. Most preferably, the peptides aligned below according to their binding strengths can be used for selective antibody depletion and detection as hereinabove.

| Cluster1 | WQNRDVYLQGPIWAKIP | (SEQ ID NO: 52) |
|---|---|---|
| 01 | ------YLQGPIW---- | (SEQ ID NO: 312) |
| 02 | -----VYLQGPI----- | (SEQ ID NO: 313) |
| 03 | WQNRDVY---------- | (SEQ ID NO: 314) |
| 05 | ----DVYLQGP------ | (SEQ ID NO: 315) |
| 08 | -QNRDVYL--------- | (SEQ ID NO: 316) |
| 12 | -------LQGPIWA--- | (SEQ ID NO: 317) |
| 20 | ---RDVYLQG------- | (SEQ ID NO: 318) |
| 50 | --NRDVYLQ-------- | (SEQ ID NO: 319) |
| Cluster2 | DNTYFGYSTPWGYFDFNRFHC | (SEQ ID NO: 53) |
| 07 | ---YFGYSTPWGYFDF----- | (SEQ ID NO: 320) |
| 09 | ----FGYSTPWGYF------- | (SEQ ID NO: 321) |
| 10 | -----GYSTPWGYFD------ | (SEQ ID NO: 322) |
| 11 | ------YSTPWGYFDF----- | (SEQ ID NO: 323) |
| 17 | -NTYFGYSTPWGYF------- | (SEQ ID NO: 324) |
| 18 | --------TPWGYFDFNRFHC | (SEQ ID NO: 325) |
| 23 | --TYFGYSTPWGYFD------ | (SEQ ID NO: 326) |
| 26 | DNTYFGYSTPWGY-------- | (SEQ ID NO: 327) |
| 28 | ---YFGYSTPWGY-------- | (SEQ ID NO: 328) |
| 34 | ----FGYSTPWGYFDFN---- | (SEQ ID NO: 329) |
| Cluster3 | MANQAKNWLPGPCY | (SEQ ID NO: 54) |
| 04 | ------NWLPGPC- | (SEQ ID NO: 330) |
| 15 | -------WIPGPCY | (SEQ ID NO: 331) |
| 16 | --QAKNWLPGPC-- | (SEQ ID NO: 332) |
| 21 | ---AKNWLPGPCY | (SEQ ID NO: 333) |
| 25 | MANQAKNWLPGPC- | (SEQ ID NO: 334) |
| Cluster4 | LPYVLGSAHQGCLPPFP | (SEQ ID NO: 55) |
| 06 | ---------QGCLPPF- | (SEQ ID NO: 335) |
| 13 | ----------GCLPPFP | (SEQ ID NO: 336) |
| 27 | ---VLGSAHQGCLPPF- | (SEQ ID NO: 337) |
| 32 | LPYVLGSAHQGCL---- | (SEQ ID NO: 338) |
| 37 | --YVLGSAHQGC----- | (SEQ ID NO: 339) |
| 38 | ----------CLPPFPA | (SEQ ID NO: 340) |
| 39 | -----SAHQGCLPPF-- | (SEQ ID NO: 341) |
| 45 | --VLGSAHQGCL----- | (SEQ ID NO: 342) |
| 46 | PYVLGSAHQGCLP---- | (SEQ ID NO: 343) |
| Cluster5 | NGSQAVGRSSFYCLEYF | (SEQ ID NO: 56) |
| 14 | ------GRSSFYC---- | (SEQ ID NO: 344) |
| 22 | ----AVGRSSFYCLEYF | (SEQ ID NO: 345) |
| 24 | ----AVGRSSFYCL--- | (SEQ ID NO: 346) |
| 33 | ---QAVGRSSFYCLEY- | (SEQ ID NO: 347) |
| 35 | NGSQAVGRSSFYC---- | (SEQ ID NO: 348) |
| Cluster6 | PLIDQYLYYL | (SEQ ID NO: 57) |
| 19 | ---DQYLYYL | (SEQ ID NO: 349) |
| 29 | PLIDQYLYYL | (SEQ ID NO: 350) |
| 36 | --IDQYLYY- | (SEQ ID NO: 351) |
| Cluster7 | EERFFPSNGILIF | (SEQ ID NO: 58) |
| 31 | ---FFPSNGILIF | (SEQ ID NO: 352) |
| 49 | EERFFPSNGILIF | (SEQ ID NO: 353) |
| Cluster8 | ADGVGSSSGNWHC | (SEQ ID NO: 59) |
| 42 | ---VGSSSGNWHC | (SEQ ID NO: 354) |
| 48 | ADGVGSSSGNWHC | (SEQ ID NO: 355) |

### Example 11: Screen for Anti-AAV Antibodies in Human Sera

[0402] 2452 linear peptides derived from the sequences of 16 different AAVs and with a sequence length of 15 amino-acids each were synthesized.

[0403] Samples obtained from human donors were screened for antibodies against these AAV-derived peptides immobilized on microarrays. To this end, IgG was prepared from blood obtained from the human donors by protein G purification. Each IgG sample was incubated with the peptide microarrays and Ig binding signals were detected by fluorescence. All antibody binding signals to the peptides on the arrays were background subtracted and ranked for each sample and a deduplicated aggregate of the respective top 250 peptide hits for each donor with the corresponding protein sequence of origin (as obtained from UniProt or other sources) was compiled (designated as group IV). Further, the deduplicated aggregate of the respective top 50 peptide hits for each donor was compiled and designated as group III. Further, the deduplicated aggregate of the respective top 25 peptide hits for each donor was compiled and designated as group II. Finally, the deduplicated aggregate of the respective top 10 peptide hits for each donor was compiled and designated as group I.

[0404] Detailed results are shown in Table 1 below. Altogether, group I contains 110 distinct peptide hits (assigned to the corresponding AAV vectors in Table 1), group II contains 289 distinct peptide hits, group III contains 428 distinct peptide hits and group IV contains 1271 distinct peptide hits. Evidently, group I is a subset of group II which in turn is a subset of group III which in turn is a subset of group IV. Groups I-IV correspond to the top 4.4%, 10.5%, 17.5% and 51.8%, respectively, of all peptides screened.

[0405] Thus, all listed peptides, preferably peptides belonging to group III, even more preferably belonging to group II and most preferably belonging to group I (i.e. to the top 4.4%), provide sequences from which shorter peptide sequences can be derived for antibody depletion according to the present invention. Furthermore, also other peptide sequences (or fragments) from the proteins from which the peptides of Table 1 were derived (preferably from group III, more preferably however from group II, most preferably from group I), are suited to be used for SADCs according to the present invention. In addition, these peptides can also be used as probes for the diagnostic detection of anti-AAV antibodies in biological samples such as human sera.

TABLE 1
This table lists the detailed results of a screen for linear peptides as a
basis for the construction of anti-AAV antibody depleting SADCs according to the
present invention. These peptides are also suitable typing neutralizing
antibodies directed against AAV vectors. If not stated otherwise, the peptides
represent fragments from different AAV VP1 proteins. Source given is either
UniProt ID, GenBank ID, PDB ID or AAV strain name.

| peptide | SEQ ID | | group | group | group | group | |
|---|---|---|---|---|---|---|---|
| # | NO | peptide | I | II | III | IV | source |
| 1 | 383 | LRTGNNFEFSYQFED | X | X | X | X | AAO88201.1 |
| 2 | 384 | TGNNFEFSYQFEDVP | X | X | X | X | AAO88201.1 |
| 3 | 385 | VATEQYGVVADNLQQ | X | X | X | X | AAO88201.1 |
| 4 | 386 | FEFSYFEDVPFHSSY | X | X | X | X | AAV-Rh74 c |
| 5 | 387 | RTGNFEFSYFEDVPF | X | X | X | X | AAV-Rh74 c |
| 6 | 388 | MLRTGNFEFSYFEDV | X | X | X | X | AAV-Rh74 c |
| 7 | 389 | PVPADPPTTFNQAKL | X | X | X | X | AAV-Rh74 c |
| 8 | 390 | TQSTGGTAGTQQLLF | X | X | X | X | AAV-Rh74 c |
| 9 | 391 | EEEIKTTNPVATEQY | X | X | X | X | AAV-Rh74 c |
| 10 | 392 | SSVMLTSEEEIKTTN | X | X | X | X | AAV-Rh74 c |
| 11 | 393 | VDFAVNTEGTYSEPR | X | X | X | X | AAV-Rh74 c |
| 12 | 394 | SVPDPQPIGEPPAGP | X | X | X | X | AAV-Rh74 c |
| 13 | 395 | EEIKTTNPVATEQYG | X | X | X | X | AAV-Rh74 c |
| 14 | 396 | PIGEPPAGPSGLGSG | X | X | X | X | AAV-Rh74 c |
| 15 | 397 | VNTEGTYSEPRPIGT | X | X | X | X | AAV-Rh74 c |
| 16 | 398 | YSSVMLTSEEEIKTT | X | X | X | X | AAV-Rh74 c |
| 17 | 399 | VATNHQSAQTLAVPF | X | X | X | X | ALU85156.1 |
| 18 | 400 | VSTNLQRGNLALGET | X | X | X | X | AOD99651.1 |
| 19 | 401 | ALGETTRPATAAQTQ | X | X | X | X | AOD99656.1 |
| 20 | 402 | TQTTGGTTNTQTLGF | X | X | X | X | pdb3J1QA |
| 21 | 403 | DDEEKFFPQSGVLIF | X | X | X | X | P03135 |
| 22 | 404 | EEEIRTTNPVATEQY | X | X | X | X | P03135 |
| 23 | 405 | PVEPDSSSGTGKAGQ | X | X | X | X | P03135 |
| 24 | 406 | IQYTSNYNKSVNVDF | X | X | X | X | P03135 |
| 25 | 407 | TDEEEIRTTNPVATE | X | X | X | X | P03135 |
| 26 | 408 | VDFTVDTNGVYSEPR | X | X | X | X | P03135 |
| 27 | 409 | VDTNGVYSEPRPIGT | X | X | X | X | P03135 |
| 28 | 410 | TMATGSGAPMADNNE | X | X | X | X | P03135 |
| 29 | 411 | TSTVQVFTDSEYQLP | X | X | X | X | P03135 |
| 30 | 412 | LYYLSRTNTPSGTTT | X | X | X | X | P03135 |
| 31 | 413 | TADVNTQGVLPGMVW | X | X | X | X | P03135 |
| 32 | 414 | GSEKTNVDIEKVMIT | X | X | X | X | P03135 |
| 33 | 415 | TNTMATGSGAPMADN | X | X | X | X | P03135 |
| 34 | 416 | WNPEIQYTSNYNKSV | X | X | X | X | P03135 |
| 35 | 417 | SYTFEDVPFHSSYAH | X | X | X | X | O56137 |
| 36 | 418 | EDVPFHSSYAHSQSL | X | X | X | X | O56137 |
| 37 | 419 | SSTDPATGDVHVMGA | X | X | X | X | O56137 |
| 38 | 420 | ATERFGTVAVNLQSS | X | X | X | X | O56137 |
| 39 | 421 | WLEDNLSEGIREWWD | X | X | X | X | O56137 |
| 40 | 422 | EEEIKATNPVATERF | X | X | X | X | O56137 |
| 41 | 423 | LEDNLSEGIREWWDL | X | X | X | X | O56137 |
| 42 | 424 | DAEFQERLQEDTSFG | X | X | X | X | O56137 |
| 43 | 425 | EWELQKENSKRWNPE | X | X | X | X | O56137 |
| 44 | 426 | SFITQYSTGQVSVEI | X | X | X | X | O56137 |
| 45 | 427 | EIEWELQKENSKRWN | X | X | X | X | O56137 |
| 46 | 428 | ITQYSTGQVSVEIEW | X | X | X | X | O56137 |
| 47 | 429 | TDEEEIKATNPVATE | X | X | X | X | O56137 |
| 48 | 430 | EEGAKTAPGKKRPVE | X | X | X | X | O56137 |
| 49 | 431 | IQVKEVTTNDGVTTI | X | X | X | X | O56137 |
| 50 | 432 | SDSEYQLPYVLGSAH | X | X | X | X | O56137 |
| 51 | 433 | PLGEPPATPAAVGPT | X | X | X | X | O56137 |
| 52 | 434 | SSASTGASNDNHYFG | X | X | X | X | O56137 |
| 53 | 435 | PVDQSPQEPDSSSGV | X | X | X | X | O56139 |
| 54 | 436 | EEAAKTAPGKKRPVD | X | X | X | X | O56139 |
| 55 | 437 | APGKKRPVDQSPQEP | X | X | X | X | O56139 |
| 56 | 438 | ILEPLGLVEEAAKTA | X | X | X | X | O56139 |
| 57 | 439 | TRTVNDQGALPGMVW | X | X | X | X | O56139 |
| 58 | 440 | KRPVDQSPQEPDSSS | X | X | X | X | O56139 |
| 59 | 441 | PLGEPPAAPTSLGSN | X | X | X | X | O56139 |
| 60 | 442 | GKKRPVDQSPQEPDS | X | X | X | X | O56139 |
| 61 | 443 | KTAPGKKRPVDQSPQ | × | X | X | X | O56139 |
| 62 | 444 | SNAELDNVMITDEEE | × | X | X | X | O56139 |
| 63 | 445 | WLEDNLSEGIREWWA | X | X | X | X | O6JC40 |
| 64 | 446 | PVPADPPTAFNKDKL | X | X | X | X | Q6JC40 |
| 65 | 447 | EFENVPFHSSYAHSQ | X | X | X | X | Q6JC40 |
| 66 | 448 | FQERLKEDTSFGGNL | X | X | X | X | Q6JC40 |
| 67 | 449 | PQILIKNTPVPADPP | X | X | X | X | Q6JC40 |
| 68 | 450 | ADAEFQERLKEDTSF | X | X | X | X | Q6JC40 |
| 69 | 451 | EEIKTTNPVATESYG | X | X | X | X | Q6JC40 |
| 70 | 452 | VEFAVNTEGVYSEPR | X | X | X | X | Q6JC40 |
| 71 | 453 | AEFQERLKEDTSFGG | X | X | X | X | Q6JC40 |
| 72 | 454 | EPDSSAGIGKSGAQP | X | X | X | X | Q6JC40 |
| 73 | 455 | LIKNTPVPADPPTAF | X | X | X | X | Q6JC40 |
| 74 | 456 | VMITNEEEIKTTNPV | X | X | X | X | Q6JC40 |
| 75 | 457 | VNTEGVYSEPRPIGT | X | X | X | X | Q6JC40 |
| 76 | 458 | DKLNSFITQYSTGQV | X | X | X | X | Q6JC40 |
| 77 | 459 | VATESYGQVATNHQS | X | X | X | X | Q6JC40 |
| 78 | 460 | DDEERFFPSNGILIF | X | X | X | X | Q8JQF8 |
| 79 | 461 | EEEIKTTNPVATEEY | X | X | X | X | Q8JQF8 |
| 80 | 462 | PVPADPPTTFNQSKL | X | X | X | X | Q8JQF8 |
| 81 | 463 | LIKNTPVPADPPTTF | X | X | X | X | Q8JQF8 |
| 82 | 464 | SSSGNWHCDSTWLGD | X | X | X | X | Q8JQF8 |
| 83 | 465 | TSVDFAVNTEGVYSE | X | X | X | X | Q8JQF8 |
| 84 | 466 | TTTGQNNNSNFAWTA | X | X | X | X | Q8JQF8 |
| 85 | 467 | VDFAVNTEGVYSEPR | X | X | X | X | Q8JQF8 |
| 86 | 468 | VSTTTGQNNNSNFAW | X | X | X | X | Q8JQF8 |
| 87 | 469 | KTAPGKKRPVEPSPQ | X | X | X | X | Q8JQF8 |
| 88 | 470 | TQTTGGTANTQTLGF | X | X | X | X | Q8JQF8 |
| 89 | 471 | VLEPLGLVEEGAKTA | X | X | X | X | Q8JQF8 |
| 90 | 472 | EEVGEGLREFLGLEA | X | X | X | X | Q9YIJ1 |
| 91 | 473 | DAEFQEKLADDTSFG | X | X | X | X | Q9YIJ1 |
| 92 | 474 | SFVDHPPDWLEEVGE | X | X | X | X | Q9YIJ1 |
| 93 | 475 | EWELKKENSKRWNPE | X | X | X | X | Q9YIJ1 |
| 94 | 476 | EMEWELKKENSKRWN | X | X | X | X | Q9YIJ1 |
| 95 | 477 | TNNYNDPQFVDFAPD | X | X | X | X | Q9YIJ1 |
| 96 | 478 | FEEVPFHSSFAPSQN | X | X | X | X | Q9YIJ1 |
| 97 | 479 | QYTNNYNDPQFVDFA | X | X | X | X | Q9YIJ1 |
| 98 | 480 | TSTVQVFTDDDYQLP | X | X | X | X | Q9YIJ1 |
| 99 | 481 | EDSKPSTSSDAEAGP | X | X | X | X | Q9YIJ1 |
| 100 | 482 | EEGAKTAPTGKRIDD | X | X | X | X | Q9YIJ1 |
| 101 | 483 | EVPFHSSFAPSQNLF | X | X | X | X | Q9YIJ1 |
| 102 | 484 | SSFITQYSTGQVTVE | X | X | X | X | Q9YIJ1 |
| 103 | 485 | ELEGASYQVPPQPNG | X | X | X | X | Q9YIJ1 |
| 104 | 486 | ERDVYLQGPIWAKIP | X | X | X | X | Q9YIJ1 |
| 105 | 487 | PQYGYATLNRDNTEN | X | X | X | X | Q9YIJ1 |
| 106 | 488 | QVTVEMEWELKKENS | X | X | X | X | Q9YIJ1 |
| 107 | 489 | VTVQDSTTTIANNLT | X | X | X | X | Q9YIJ1 |
| 108 | 490 | YNEQLEAGDNPYLKY | X | X | X | X | Q9YIJ1 |
| 109 | 491 | YNNHQYREIKSGSVD | X | X | X | X | Q9YIJ1 |
| 110 | 492 | TSSDAEAGPSGSQQL | X | X | X | X | Q9YIJ1 |
| 111 | 493 | FEFSYQFEDVPFHSS | | X | X | X | AAO88201.1 |
| 112 | 494 | NNFEFSYQFEDVPFH | | X | X | X | AAO88201.1 |
| 113 | 495 | YQFEDVPFHSSYAHS | | X | X | X | AAO88201.1 |
| 114 | 496 | QGAGKDNVDYSSVML | | X | X | X | AAO88201.1 |
| 115 | 497 | TPVPADPPTTFSQAK | | X | X | X | AAO88201.1 |
| 116 | 498 | IKTTNPVATEQYGVV | | X | X | X | AAO88201.1 |
| 117 | 499 | GNFEFSYFEDVPFHS | | X | X | X | AAV-Rh74 c |
| 118 | 500 | FSYFEDVPFHSSYAH | | X | X | X | AAV-Rh74 c |
| 119 | 501 | YFEDVPFHSSYAHSQ | | X | X | X | AAV-Rh74 c |
| 120 | 502 | EYFPSQMLRTGNFEF | | X | X | X | AAV-Rh74 c |
| 121 | 503 | EIKTTNPVATEQYGW | | X | X | X | AAV-Rh74 c |
| 122 | 504 | RTQSTGGTAGTQQLL | | X | X | X | AAV-Rh74 c |
| 123 | 505 | DNVDYSSVMLTSEEE | | X | X | X | AAV-Rh74 c |
| 124 | 506 | DEERFFPSSGVLMFG | | X | X | X | AAV-Rh74 c |
| 125 | 507 | TNVDFAVNTEGTYSE | | X | X | X | AAV-Rh74 c |
| 126 | 508 | EIQYTSNYYKSTNVD | | X | X | X | AAV-Rh74 c |
| 127 | 509 | RVSTTLSQNNNSNFA | | X | X | X | AAV-Rh74 c |
| 128 | 510 | SESVPDPQPIGEPPA | | X | X | X | AAV-Rh74 c |
| 129 | 511 | QRVSTTLSQNNNSNF | | X | X | X | AAV-Rh74 c |
| 130 | 512 | VDYSSVMLTSEEEIK | | X | X | X | AAV-Rh74 c |
| 131 | 513 | PQPIGEPPAGPSGLG | | X | X | X | AAV-Rh74 c |
| 132 | 514 | QQRVSTTLSQNNNSN | | X | X | X | AAV-Rh74 c |
| 133 | 515 | VSTTLSQNNNSNFAW | | X | X | X | AAV-Rh74 c |
| 134 | 516 | TTRPATAPQIGTVNS | | X | X | X | AOD99652.1 |
| 135 | 517 | EYGAVAINNQAANLA | | X | X | X | AOD99654.1 |
| 136 | 518 | TTRPATAAQTQVVNN | | X | X | X | AOD99656.1 |
| 137 | 519 | NQSLALGETTRPAST | | X | X | X | AOD99659.1 |
| 138 | 520 | GQMATNNQSLALGET | | X | X | X | AOD99659.1 |
| 139 | 521 | MATNNQSLALGETTR | | X | X | X | AOD99659.1 |
| 140 | 522 | TNNQSLALGETTRPA | | X | X | X | AOD99659.1 |
| 141 | 523 | DSVPDPQPIGEPPAA | | X | X | X | pdb3J1QA |
| 142 | 524 | TGDADSVPDPQPIGE | | X | X | X | pdb3J1QA |
| 143 | 525 | SLTMAAGGGAPMADN | | X | X | X | pdb3J1QA |
| 144 | 526 | TTGGTTNTQTLGFSQ | | X | X | X | pdb3J1QA |
| 145 | 527 | LYYLSRTQTTGGTTN | | X | X | X | pdb3J1QA |
| 146 | 528 | SRTQTTGGTTNTQTL | | X | X | X | pdb3J1QA |
| 147 | 529 | YLSRTQTTGGTTNTQ | | X | X | X | pdb3J1QA |
| 148 | 530 | DGYLPDWLEDTLSEG | | X | X | X | P03135 |
| 149 | 531 | PPFPADVFMVPQYGY | | X | X | X | P03135 |
| 150 | 532 | GEPVNEADAAALEHD | | X | X | X | P03135 |
| 151 | 533 | VNVDFTVDTNGVYSE | | X | X | X | P03135 |
| 152 | 534 | EEKFFPQSGVLIFGK | | X | X | X | P03135 |
| 153 | 535 | PDWLEDTLSEGIRQW | | X | X | X | P03135 |
| 154 | 536 | PVNEADAAALEHDKA | | X | X | X | P03135 |
| 155 | 537 | TNVDIEKVMITDEEE | | X | X | X | P03135 |
| 156 | 538 | VDIEKVMITDEEEIR | | X | X | X | P03135 |
| 157 | 539 | PEIQYTSNYNKSVNV | | X | X | X | P03135 |
| 158 | 540 | VEEPVKTAPGKKRPV | | X | X | X | P03135 |
| 159 | 541 | ASHKDDEEKFFPQSG | | X | X | X | P03135 |
| 160 | 542 | EPVNEADAAALEHDK | | X | X | X | P03135 |
| 161 | 543 | ERHKDDSRGLVLPGY | | X | X | X | P03135 |
| 162 | 544 | GNSSGNWHCDSTWMG | | X | X | X | P03135 |
| 163 | 545 | PVPANPSTTFSAAKF | | X | X | X | P03135 |
| 164 | 546 | AAALEHDKAYDRQLD | | X | X | X | P03135 |
| 165 | 547 | FNGLDKGEPVNEADA | | X | X | X | P03135 |
| 166 | 548 | YTSNYNKSVNVDFTV | | X | X | X | P03135 |
| 167 | 549 | EDTLSEGIRQWWKLK | | X | X | X | P03135 |
| 168 | 550 | EPDSSSGTGKAGQQP | | X | X | X | P03135 |
| 169 | 551 | NNSEYSWTGATKYHL | | X | X | X | P03135 |
| 170 | 552 | SNYNKSVNVDFTVDT | | X | X | X | P03135 |
| 171 | 553 | SSQSGASNDNHYFGY | | X | X | X | P03135 |
| 172 | 554 | KRWNPEIQYTSNYNK | | X | X | X | P03135 |
| 173 | 555 | YLSRTNTPSGTTTQS | | X | X | X | P03135 |
| 174 | 556 | YTFEDVPFHSSYAHS | | X | X | X | O56137 |
| 175 | 557 | FEDVPFHSSYAHSQS | | X | X | X | O56137 |
| 176 | 558 | QSSSTDPATGDVHVM | | X | X | X | O56137 |
| 177 | 559 | PDWLEDNLSEGIREW | | X | X | X | O56137 |
| 178 | 560 | DWLEDNLSEGIREWW | | X | X | X | O56137 |
| 179 | 561 | QYSTGQVSVEIEWEL | | X | X | X | O56137 |
| 180 | 562 | DGYLPDWLEDNLSEG | | X | X | X | O56137 |
| 181 | 563 | EDNLSEGIREWWDLK | | X | X | X | O56137 |
| 182 | 564 | DNHYFGYSTPWGYFD | | X | X | X | O56137 |
| 183 | 565 | PVEQSPQEPDSSSGI | | X | X | X | O56137 |
| 184 | 566 | ADGYLPDWLEDNLSE | | X | X | X | O56137 |
| 185 | 567 | GDSESVPDPQPLGEP | | X | X | X | O56137 |
| 186 | 568 | GEPVNAADAAALEHD | | X | X | X | O56137 |
| 187 | 569 | EDTSFGGNLGRAVFQ | | X | X | X | O56137 |
| 188 | 570 | GCLPPFPADVFMIPQ | | X | X | X | O56137 |
| 189 | 571 | PVPANPPAEFSATKF | | X | X | X | O56137 |
| 190 | 572 | SESVPDPQPLGEPPA | | X | X | X | O56137 |
| 191 | 573 | EFQERLQEDTSFGGN | | X | X | X | O56137 |
| 192 | 574 | DAAALEHDKAYDQQL | | X | X | X | O56137 |
| 193 | 575 | EPVNAADAAALEHDK | | X | X | X | O56137 |
| 194 | 576 | QRVSKTKTDNNNSNF | | X | X | X | O56137 |
| 195 | 577 | DSESVPDPQPLGEPP | | X | X | X | O56137 |
| 196 | 578 | EHDKAYDQQLKAGDN | | X | X | X | O56137 |
| 197 | 579 | LPGMVWQDRDVYLQG | | X | X | X | O56137 |
| 198 | 580 | VSVEIEWELQKENSK | | X | X | X | O56137 |
| 199 | 581 | DSEYQLPYVLGSAHQ | | X | X | X | O56137 |
| 200 | 582 | PQPLGEPPATPAAVG | | X | X | X | O56137 |
| 201 | 583 | VEIEWELQKENSKRW | | X | X | X | O56137 |
| 202 | 584 | EYFPSQMLRTGNNFT | | X | X | X | O56137 |
| 203 | 585 | PLIDQYLYYLNRTQN | | X | X | X | O56137 |
| 204 | 586 | QVSVEIEWELQKENS | | X | X | X | O56137 |
| 205 | 587 | ASNDNHYFGYSTPWG | | X | X | X | O56137 |
| 206 | 588 | EIKATNPVATERFGT | | X | X | X | O56137 |
| 207 | 589 | GSAHQGCLPPFPADV | | X | X | X | O56137 |
| 208 | 590 | SSSGIGKTGQQPAKK | | X | X | X | O56137 |
| 209 | 591 | AAALEHDKAYDQQLK | | X | X | X | O56137 |
| 210 | 592 | NNFQFSYTFEDVPFH | | X | X | X | O56139 |
| 211 | 593 | TGNNFQFSYTFEDVP | | X | X | X | O56139 |
| 212 | 594 | LRTGNNFQFSYTFED | | X | X | X | O56139 |
| 213 | 595 | EADAAALEHDKAYDQ | | X | X | X | O56139 |
| 214 | 596 | PQPLGEPPAAPTSLG | | X | X | X | O56139 |
| 215 | 597 | SSSGVGKSGKQPARK | | X | X | X | O56139 |
| 216 | 598 | DDEEKFFPMHGNLIF | | X | X | X | O56139 |
| 217 | 599 | QRLSKTANDNNNSNF | | X | X | X | O56139 |
| 218 | 600 | TTSGTTNQSRLLFSQ | | X | X | X | O56139 |
| 219 | 601 | SYEFENVPFHSSYAH | | X | X | X | Q6JC40 |
| 220 | 602 | QFSYEFENVPFHSSY | | X | X | X | Q6JC40 |
| 221 | 603 | ERLKEDTSFGGNLGR | | X | X | X | Q6JC40 |
| 222 | 604 | ESVPDPQPIGEPPAA | | X | X | X | Q6JC40 |
| 223 | 605 | NNVEFAVNTEGVYSE | | X | X | X | Q6JC40 |
| 224 | 606 | NEEEIKTTNPVATES | | X | X | X | Q6JC40 |
| 225 | 607 | SLIFGKQGTGRDNVD | | X | X | X | Q6JC40 |
| 226 | 608 | EDNLSEGIREWWALK | | X | X | X | Q6JC40 |
| 227 | 609 | NSFITQYSTGQVSVE | | X | X | X | Q6JC40 |
| 228 | 610 | SSNDNAYFGYSTPWG | | X | X | X | Q6JC40 |
| 229 | 611 | TPVPADPPTAFNKDK | | X | X | X | Q6JC40 |
| 230 | 612 | VEEAAKTAPGKKRPV | | X | X | X | Q6JC40 |
| 231 | 613 | IKNTPVPADPPTAFN | | X | X | X | Q6JC40 |
| 232 | 614 | IKTTNPVATESYGQV | | X | X | X | Q6JC40 |
| 233 | 615 | IQYTSNYYKSNNVEF | | X | X | X | Q6JC40 |
| 234 | 616 | QILIKNTPVPADPPT | | X | X | X | Q6JC40 |
| 235 | 617 | AFNKDKLNSFITQYS | | X | X | X | Q6JC40 |
| 236 | 618 | EYFPSQMLRTGNNFQ | | X | X | X | Q6JC40 |
| 237 | 619 | ITNEEEIKTTNPVAT | | X | X | X | Q6JC40 |
| 238 | 620 | LKEDTSFGGNLGRAV | | X | X | X | Q6JC40 |
| 239 | 621 | VATNHQSAQAQAQTG | | X | X | X | Q6JC40 |
| 240 | 622 | DADKVMITNEEEIKT | | X | X | X | Q6JC40 |
| 241 | 623 | SLTMASGGGAPVADN | | X | X | X | Q6JC40 |
| 242 | 624 | NKDKLNSFITQYSTG | | X | X | X | Q6JC40 |
| 243 | 625 | QPIGEPPAAPSGVGS | | X | X | X | Q6JC40 |
| 244 | 626 | DNADYSDVMLTSEEE | | X | X | X | Q8JQF8 |
| 245 | 627 | TYTFEDVPFHSSYAH | | X | X | X | Q8JQF8 |
| 246 | 628 | ARDNADYSDVMLTSE | | X | X | X | Q8JQF8 |
| 247 | 629 | IGTVNSQGALPGMVW | | X | X | X | Q8JQF8 |
| 248 | 630 | EEYGIVADNLQQQNT | | X | X | X | Q8JQF8 |
| 249 | 631 | QRVSTTTGQNNNSNF | | X | X | X | Q8JQF8 |
| 250 | 632 | DGVGSSSGNWHCDST | | X | X | X | Q8JQF8 |
| 251 | 633 | IKNTPVPADPPTTFN | | X | X | X | Q8JQF8 |
| 252 | 634 | ILIKNTPVPADPPTT | | X | X | X | Q8JQF8 |
| 253 | 635 | STIQVFTDSEYQLPY | | X | X | X | Q8JQF8 |
| 254 | 636 | CYRQQRVSTTTGQNN | | X | X | X | Q8JQF8 |
| 255 | 637 | HDKAYDQQLQAGDNP | | X | X | X | Q8JQF8 |
| 256 | 638 | LYYLSRTQTTGGTAN | | X | X | X | Q8JQF8 |
| 257 | 639 | TFNQSKLNSFITQYS | | X | X | X | Q8JQF8 |
| 258 | 640 | VTQNEGTKTIANNLT | | X | X | X | Q8JQF8 |
| 259 | 641 | QYLYYLSRTQTTGGT | | X | X | X | Q8JQF8 |
| 260 | 642 | SRTQTTGGTANTQTL | | X | X | X | Q8JQF8 |
| 261 | 643 | NTYFGYSTPWGYFDF | | X | X | X | Q8JQF8 |
| 262 | 644 | PVEPSPQRSPDSSTG | | X | X | X | Q8JQF8 |
| 263 | 645 | SVPDPQPLGEPPAAP | | X | X | X | Q8JQF8 |
| 264 | 646 | EPSPQRSPDSSTGIG | | X | X | X | Q8JQF8 |
| 265 | 647 | NNFEFTYNFEEVPFH | | X | X | X | Q9YIJ1 |
| 266 | 648 | PDWLEEVGEGLREFL | | X | X | X | Q9YIJ1 |
| 267 | 649 | TGNNFEFTYNFEEVP | | X | X | X | Q9YIJ1 |
| 268 | 650 | LRTGNNFEFTYNFEE | | X | X | X | Q9YIJ1 |
| 269 | 651 | EPVNRADEVAREHDI | | X | X | X | Q9YIJ1 |
| 270 | 652 | TEEDSKPSTSSDAEA | | X | X | X | Q9YIJ1 |
| 271 | 653 | TQYSTGQVTVEMEWE | | X | X | X | Q9YIJ1 |
| 272 | 654 | ESETQPVNRVAYNVG | | X | X | X | Q9YIJ1 |
| 273 | 655 | NLTSTVQVFTDDDYQ | | X | X | X | Q9YIJ1 |
| 274 | 656 | EIQYTNNYNDPQFVD | | X | X | X | Q9YIJ1 |
| 275 | 657 | PVPGNITSFSDVPVS | | X | X | X | Q9YIJ1 |
| 276 | 658 | TVEMEWELKKENSKR | | X | X | X | Q9YIJ1 |
| 277 | 659 | EFQEKLADDTSFGGN | | X | X | X | Q9YIJ1 |
| 278 | 660 | EQLEAGDNPYLKYNH | | X | X | X | Q9YIJ1 |
| 279 | 661 | NYNDPQFVDFAPDST | | X | X | X | Q9YIJ1 |
| 280 | 662 | SSLGADTMSAGGGGP | | X | X | X | Q9YIJ1 |
| 281 | 663 | SKPSTSSDAEAGPSG | | X | X | X | Q9YIJ1 |
| 282 | 664 | FITQYSTGQVTVEME | | X | X | X | Q9YIJ1 |
| 283 | 665 | EFLGLEAGPPKPKPN | | X | X | X | Q9YIJ1 |
| 284 | 666 | NVGGQMATNNQSSTT | | X | X | X | Q9YIJ1 |
| 285 | 667 | PSKMLRTGNNFEFTY | | X | X | X | Q9YIJ1 |
| 286 | 668 | VLEPFGLVEEGAKTA | | X | X | X | Q9YIJ1 |
| 287 | 669 | AQPASSLGADTMSAG | | X | X | X | Q9YIJ1 |
| 288 | 670 | VQDSTTTIANNLTST | | X | X | X | Q9YIJ1 |
| 289 | 671 | YLEGNMLITSESETQ | | X | X | X | Q9YIJ1 |
| 290 | 672 | NVDFAVNTDGTYSEP | | | X | X | AAO88201.1 |
| 291 | 673 | KDNVDYSSVMLTSEE | | | X | X | AAO88201.1 |
| 292 | 674 | HDDEERFFPSSGVLM | | | X | X | AAV-Rh74 c |
| 293 | 675 | SQMLRTGNFEFSYFE | | | X | X | AAV-Rh74 c |
| 294 | 676 | GDSESVPDPQPIGEP | | | X | X | AAV-Rh74 c |
| 295 | 677 | DNPYLRYHADAEFQE | | | X | X | AAV-Rh74 c |
| 296 | 678 | NTPVPADPPTTFNQA | | | X | X | AAV-Rh74 c |
| 297 | 679 | DSLVNPGVAMATHDD | | | X | X | AAV-Rh74 c |
| 298 | 680 | PLGLVESPVKTAPGK | | | X | X | AAV-Rh74 c |
| 299 | 681 | SRTQSTGGTAGTQQL | | | X | X | AAV-Rh74 c |
| 300 | 682 | TFNQAKLASFITQYS | | | X | X | AAV-Rh74 c |
| 301 | 683 | STTLSQNNNSNFAWT | | | × | X | AAV-Rh74 c |
| 302 | 684 | SSTGIGKKGQQPAKK | | | X | X | AAV-Rh74 c |
| 303 | 685 | KSTNVDFAVNTEGTY | | | X | X | AAV-Rh74 c |
| 304 | 686 | TYSEPRPIGTRYLTR | | | X | X | AAV-Rh74 c |
| 305 | 687 | EYGIVADNLQQQNLA | | | X | X | AOD99652.1 |
| 306 | 688 | RPATAPQIGTVNSQG | | | X | X | AOD99652.1 |
| 307 | 689 | GETTRPATAAQTQVV | | | × | X | AOD99656.1 |
| 308 | 690 | EYGIVSSNLQAANLA | | | × | X | AOD99656.1 |
| 309 | 691 | SNLQAANLALGETTR | | | X | X | AOD99656.1 |
| 310 | 692 | DADSVPDPQPIGEPP | | | X | X | pdb3J1QA |
| 311 | 693 | QGVLPGMVWQDRDVY | | | X | X | P03135 |
| 312 | 694 | NEADAAALEHDKAYD | | | X | X | P03135 |
| 313 | 695 | QGCLPPFPADVFMVP | | | X | X | P03135 |
| 314 | 696 | EHDKAYDRQLDSGDN | | | X | X | P03135 |
| 315 | 697 | PFPADVFMVPQYGYL | | | X | X | P03135 |
| 316 | 698 | EPVKTAPGKKRPVEH | | | X | X | P03135 |
| 317 | 699 | HKDDEEKFFPQSGVL | | | X | X | P03135 |
| 318 | 700 | DKGEPVNEADAAALE | | | X | X | P03135 |
| 319 | 701 | EQYGSVSTNLQRGNR | | | X | X | P03135 |
| 320 | 702 | GPPPPKPAERHKDDS | | | X | X | P03135 |
| 321 | 703 | IEKVMITDEEEIRTT | | | X | X | P03135 |
| 322 | 704 | KSVNVDFTVDTNGVY | | | X | X | P03135 |
| 323 | 705 | RPVEHSPVEPDSSSG | | | X | X | P03135 |
| 324 | 706 | SDIRDQSRNWLPGPC | | | X | X | P03135 |
| 325 | 707 | DNNEGADGVGNSSGN | | | X | X | P03135 |
| 326 | 708 | PVATEQYGSVSTNLQ | | | X | X | P03135 |
| 327 | 709 | QVKEVTQNDGTTTIA | | | X | X | P03135 |
| 328 | 710 | STVQVFTDSEYQLPY | | | X | X | P03135 |
| 329 | 711 | DADSVPDPQPLGQPP | | | X | X | P03135 |
| 330 | 712 | DSGDNPYLKYNHADA | | | X | X | P03135 |
| 331 | 713 | DSLVNPGPAMASHKD | | | X | X | P03135 |
| 332 | 714 | ISSQSGASNDNHYFG | | | X | X | P03135 |
| 333 | 715 | MITDEEEIRTTNPVA | | | X | X | P03135 |
| 334 | 716 | RQWWKLKPGPPPPKP | | | X | X | P03135 |
| 335 | 717 | VKEVTQNDGTTTIAN | | | X | X | P03135 |
| 336 | 718 | VTQNDGTTTIANNLT | | | X | X | P03135 |
| 337 | 719 | ADNNEGADGVGNSSG | | | X | X | P03135 |
| 338 | 720 | PLGLVEEPVKTAPGK | | | X | X | P03135 |
| 339 | 721 | GNNFTFSYTFEDVPF | | | X | X | O56137 |
| 340 | 722 | FSYTFEDVPFHSSYA | | | X | X | O56137 |
| 341 | 723 | TFSYTFEDVPFHSSY | | | X | X | O56137 |
| 342 | 724 | DDKDKFFPMSGVMIF | | | X | X | O56137 |
| 343 | 725 | TFEDVPFHSSYAHSQ | | | X | X | O56137 |
| 344 | 726 | TGDVHVMGALPGMVW | | | X | X | O56137 |
| 345 | 727 | HVMGALPGMVWQDRD | | | X | X | O56137 |
| 346 | 728 | TVAVNLQSSSTDPAT | | | X | X | O56137 |
| 347 | 729 | AVNLQSSSTDPATGD | | | X | X | O56137 |
| 348 | 730 | NHYFGYSTPWGYFDF | | | X | X | O56137 |
| 349 | 731 | GSQAVGRSSFYCLEY | | | X | X | O56137 |
| 350 | 732 | TQYSTGQVSVEIEWE | | | X | X | O56137 |
| 351 | 733 | YLPDWLEDNLSEGIR | | | X | X | O56137 |
| 352 | 734 | SNTALDNVMITDEEE | | | X | X | O56137 |
| 353 | 735 | TPWGYFDFNRFHCHF | | | X | X | O56137 |
| 354 | 736 | YFDFNRFHCHFSPRD | | | X | X | O56137 |
| 355 | 737 | GYLPDWLEDNLSEGI | | | X | X | O56137 |
| 356 | 738 | YSTGQVSVEIEWELQ | | | X | X | O56137 |
| 357 | 739 | SLDRLMNPLIDQYLY | | | X | X | O56137 |
| 358 | 740 | STVQVFSDSEYQLPY | | | X | X | O56137 |
| 359 | 741 | SVPDPQPLGEPPATP | | | X | X | O56137 |
| 360 | 742 | EFSATKFASFITQYS | | | X | X | O56137 |
| 361 | 743 | YSTPWGYFDFNRFHC | | | X | X | O56137 |
| 362 | 744 | AHQGCLPPFPADVFM | | | X | X | O56137 |
| 363 | 745 | ASFITQYSTGQVSVE | | | X | X | O56137 |
| 364 | 746 | EWWDLKPGAPKPKAN | | | X | X | O56137 |
| 365 | 747 | GEPPATPAAVGPTTM | | | X | X | O56137 |
| 366 | 748 | MVWQDRDVYLQGPIW | | | X | X | O56137 |
| 367 | 749 | DKGEPVNAADAAALE | | | X | X | O56137 |
| 368 | 750 | ERLQEDTSFGGNLGR | | | X | X | O56137 |
| 369 | 751 | EYQLPYVLGSAHQGC | | | X | X | O56137 |
| 370 | 752 | FITQYSTGQVSVEIE | | | X | X | O56137 |
| 371 | 753 | MITDEEEIKATNPVA | | | X | X | O56137 |
| 372 | 754 | AADAAALEHDKAYDQ | | | X | X | O56137 |
| 373 | 755 | AVGPTTMASGGGAPM | | | X | X | O56137 |
| 374 | 756 | DSTWLGDRVITTSTR | | | X | X | O56137 |
| 375 | 757 | ATPAAVGPTTMASGG | | | X | X | O56137 |
| 376 | 758 | DNNEGADGVGNASGN | | | X | X | O56137 |
| 377 | 759 | EQSPQEPDSSSGIGK | | | X | X | O56137 |
| 378 | 760 | FNIQVKEVTTNDGVT | | | X | X | O56137 |
| 379 | 761 | PAAVGPTTMASGGGA | | | X | X | O56137 |
| 380 | 762 | SSYAHSQSLDRLMNP | | | X | X | O56137 |
| 381 | 763 | TAPGKKRPVEQSPQE | | | X | X | O56137 |
| 382 | 764 | FHSSYAHSQSLDRLM | | | X | X | O56137 |
| 383 | 765 | FNGLDKGEPVNAADA | | | X | X | O56137 |
| 384 | 766 | HSSYAHSQSLDRLMN | | | X | X | O56137 |
| 385 | 767 | TTSTRTWALPTYNNH | | | X | X | O56137 |
| 386 | 768 | VKEVTTNDGVTTIAN | | | X | X | O56137 |
| 387 | 769 | DGVGNSSGNWHCDSQ | | | X | X | 056139 |
| 388 | 770 | NSSGNWHCDSQWLGD | | | X | X | 056139 |
| 389 | 771 | AKKRILEPLGLVEEA | | | X | X | 056139 |
| 390 | 772 | PVPANPPTTFSPAKF | | | X | X | 056139 |
| 391 | 773 | NNSNFPWTAASKYHL | | | X | X | 056139 |
| 392 | 774 | PDSSSGVGKSGKQPA | | | X | X | 056139 |
| 393 | 775 | QSSNTAPTTRTVNDQ | | | X | X | 056139 |
| 394 | 776 | TVANNLQSSNTAPTT | | | X | X | 056139 |
| 395 | 777 | AELDNVMITDEEEIR | | | X | X | 056139 |
| 396 | 778 | EEKFFPMHGNLIFGK | | | X | X | 056139 |
| 397 | 779 | GNNFQFSYEFENVPF | | | X | X | Q6JC40 |
| 398 | 780 | NVEFAVNTEGVYSEP | | | X | X | Q6JC40 |
| 399 | 781 | MLRTGNNFQFSYEFE | | | X | X | Q6JC40 |
| 400 | 782 | RTGNNFQFSYEFENV | | | X | X | Q6JC40 |
| 401 | 783 | STVQVFTDSDYQLPY | | | X | X | Q6JC40 |
| 402 | 784 | DGSQAVGRSSFYCLE | | | X | X | Q6JC40 |
| 403 | 785 | EFAVNTEGVYSEPRP | | | X | X | Q6JC40 |
| 404 | 786 | EFAWPGASSWALNGR | | | X | X | Q6JC40 |
| 405 | 787 | DTESVPDPQPIGEPP | | | X | X | Q6JC40 |
| 406 | 788 | NNNSEFAWPGASSWA | | | X | X | Q6JC40 |
| 407 | 789 | NTPVPADPPTAFNKD | | | X | X | Q6JC40 |
| 408 | 790 | STTVTQNNNSEFAWP | | | X | X | Q6JC40 |
| 409 | 791 | EIQYTSNYYKSNNVE | | | X | X | Q6JC40 |
| 410 | 792 | ENVPFHSSYAHSQSL | | | X | X | Q6JC40 |
| 411 | 793 | ILIKNTPVPADPPTA | | | X | X | Q6JC40 |
| 412 | 794 | RVSTTVTQNNNSEFA | | | X | X | Q6JC40 |
| 413 | 795 | SDYQLPYVLGSAHEG | | | X | X | Q6JC40 |
| 414 | 796 | GNGLDKGEPVNAADA | | | X | X | Q6JC40 |
| 415 | 797 | KSNNVEFAVNTEGVY | | | X | X | Q6JC40 |
| 416 | 798 | LNSFITQYSTGQVSV | | | X | X | Q6JC40 |
| 417 | 799 | QQTLKFSVAGPSNMA | | | X | X | Q6JC40 |
| 418 | 800 | SSGNWHCDSQWLGDR | | | X | X | Q6JC40 |
| 419 | 801 | ADNNEGADGVGSSSG | | | X | X | Q6JC40 |
| 420 | 802 | ASGGGAPVADNNEGA | | | X | X | Q6JC40 |
| 421 | 803 | IGEPPAAPSGVGSLT | | | X | X | Q6JC40 |
| 422 | 804 | PLGLVEEAAKTAPGK | | | X | X | Q6JC40 |
| 423 | 805 | SAGIGKSGAQPAKKR | | | X | X | Q6JC40 |
| 424 | 806 | ENSKRWNPEIQYTSN | | | X | X | Q6JC40 |
| 425 | 807 | ELQKENSKRWNPEIQ | | | X | X | Q6JC40 |
| 426 | 808 | GNNFQFTYTFEDVPF | | | X | X | Q8JQF8 |
| 427 | 809 | EERFFPSNGILIFGK | | | X | X | Q8JQF8 |
| 428 | 810 | PVATEEYGIVADNLQ | | | X | X | Q8JQF8 |
| 429 | 811 | QFTYTFEDVPFHSSY | | | X | X | Q8JQF8 |
| 430 | 812 | NTPVPADPPTTFNQS | | | X | X | Q8JQF8 |
| 431 | 813 | EIKTTNPVATEEYGI | | | X | X | Q8JQF8 |
| 432 | 814 | GSSSGNWHCDSTWLG | | | X | X | Q8JQF8 |
| 433 | 815 | RTGNNFQFTYTFEDV | | | X | X | Q8JQF8 |
| 434 | 816 | TNPVATEEYGIVADN | | | X | X | Q8JQF8 |
| 435 | 817 | TSEEEIKTTNPVATE | | | X | X | Q8JQF8 |
| 436 | 818 | GPCYRQQRVSTTTGQ | | | X | X | Q8JQF8 |
| 437 | 819 | LPGPCYRQQRVSTTT | | | X | X | Q8JQF8 |
| 438 | 820 | TTGGTANTQTLGFSQ | | | X | X | Q8JQF8 |
| 439 | 821 | KQISNGTSGGATNDN | | | X | X | Q8JQF8 |
| 440 | 822 | KQNAARDNADYSDVM | | | X | X | Q8JQF8 |
| 441 | 823 | NAARDNADYSDVMLT | | | X | X | Q8JQF8 |
| 442 | 824 | SKLNSFITQYSTGQV | | | X | X | Q8JQF8 |
| 443 | 825 | VKEVTQNEGTKTIAN | | | X | X | Q8JQF8 |
| 444 | 826 | VNSQGALPGMVWQNR | | | X | X | Q8JQF8 |
| 445 | 827 | NNSNFAWTAGTKYHL | | | X | X | Q8JQF8 |
| 446 | 828 | QQQNTAPQIGTVNSQ | | | X | X | Q8JQF8 |
| 447 | 829 | YNNHLYKQISNGTSG | | | X | X | Q8JQF8 |
| 448 | 830 | YSDVMLTSEEEIKTT | | | X | X | Q8JQF8 |
| 449 | 831 | DNTYFGYSTPWGYFD | | | X | X | Q8JQF8 |
| 450 | 832 | TYFGYSTPWGYFDFN | | | X | X | Q8JQF8 |
| 451 | 833 | ESVPDPQPLGEPPAA | | | X | X | Q8JQF8 |
| 452 | 834 | STGIGKKGQQPARKR | | | X | X | Q8JQF8 |
| 453 | 835 | FGYSTPWGYFDFNRF | | | X | X | Q9YIJ1 |
| 454 | 836 | YFGYSTPWGYFDFNR | | | X | X | Q9YIJ1 |
| 455 | 837 | NAYFGYSTPWGYFDF | | | X | X | Q9YIJ1 |
| 456 | 838 | HPPDWLEEVGEGLRE | | | X | X | Q9YIJ1 |
| 457 | 839 | TENPTERSSFFCLEY | | | X | X | Q9YIJ1 |
| 458 | 840 | WLEEVGEGLREFLGL | | | X | X | Q9YIJ1 |
| 459 | 841 | YSTGQVTVEMEWELK | | | X | X | Q9YIJ1 |
| 460 | 842 | FVDFAPDSTGEYRTT | | | X | X | Q9YIJ1 |
| 461 | 843 | QEIVPGSVWMERDVY | | | X | X | Q9YIJ1 |
| 462 | 844 | TPWGYFDFNRFHSHW | | | X | X | Q9YIJ1 |
| 463 | 845 | ANAYFGYSTPWGYFD | | | X | X | Q9YIJ1 |
| 464 | 846 | DDDYQLPYVVGNGTE | | | X | X | Q9YIJ1 |
| 465 | 847 | DEVAREHDISYNEQL | | | X | X | Q9YIJ1 |
| 466 | 848 | ELKKENSKRWNPEIQ | | | X | X | Q9YIJ1 |
| 467 | 849 | GNASGDWHCDSTWMG | | | X | X | Q9YIJ1 |
| 468 | 850 | GYNYLGPGNGLDRGE | | | X | X | Q9YIJ1 |
| 469 | 851 | TSFSDVPVSSFITQY | | | X | X | Q9YIJ1 |
| 470 | 852 | ANNLTSTVQVFTDDD | | | X | X | Q9YIJ1 |
| 471 | 853 | DQYLYRFVSTNNTGG | | | X | X | Q9YIJ1 |
| 472 | 854 | EYRTTRPIGTRYLTR | | | X | X | Q9YIJ1 |
| 473 | 855 | IFNIQVKEVTVQDST | | | X | X | Q9YIJ1 |
| 474 | 856 | ENSKRWNPEIQYTNN | | | X | X | Q9YIJ1 |
| 475 | 857 | AGPPKPKPNQQHQDQ | | | X | X | Q9YIJ1 |
| 476 | 858 | PSTSSDAEAGPSGSQ | | | X | X | Q9YIJ1 |
| 477 | 859 | TGQVTVEMEWELKKE | | | X | X | Q9YIJ1 |
| 478 | 860 | VKIFNIQVKEVTVQD | | | X | X | Q9YIJ1 |
| 479 | 861 | DSTTTIANNLTSTVQ | | | X | X | Q9YIJ1 |
| 480 | 862 | ISYNEQLEAGDNPYL | | | X | X | Q9YIJ1 |
| 481 | 863 | LGLEAGPPKPKPNQQ | | | X | X | Q9YIJ1 |
| 482 | 864 | TAPATGTYNLQEIVP | | | X | X | Q9YIJ1 |
| 483 | 865 | TMSAGGGGPLGDNNQ | | | X | X | Q9YIJ1 |
| 484 | 866 | FSYQFEDVPFHSSYA | | | | X | AAO88201.1 |
| 485 | 867 | VLMFGKQGAGKDNVD | | | | X | AAO88201.1 |
| 486 | 868 | DFAVNTDGTYSEPRP | | | | X | AAO88201.1 |
| 487 | 869 | DGTYSEPRPIGTRYL | | | | X | AAO88201.1 |
| 488 | 870 | GAVNSQGALPGMVWQ | | | | X | AAO88201.1 |
| 489 | 871 | QMLRTGNNFEFSYQF | | | | X | AAO88201.1 |
| 490 | 872 | MFGKQGAGKDNVDYS | | | | X | AAO88201.1 |
| 491 | 873 | APIVGAVNSQGALPG | | | | X | AAO88201.1 |
| 492 | 874 | IVGAVNSQGALPGMV | | | | X | AAO88201.1 |
| 493 | 875 | LQQQNAAPIVGAVNS | | | | X | AAO88201.1 |
| 494 | 876 | NTDGTYSEPRPIGTR | | | | X | AAO88201.1 |
| 495 | 877 | STNVDFAVNTDGTYS | | | | X | AAO88201.1 |
| 496 | 878 | KDDEERFFPSSGVLM | | | | X | AAO88201.1 |
| 497 | 879 | THKDDEERFFPSSGV | | | | X | AAO88201.1 |
| 498 | 880 | VNPGVAMATHKDDEE | | | | X | AAO88201.1 |
| 499 | 881 | KNTPVPADPPTTFSQ | | | | X | AAO88201.1 |
| 500 | 882 | MATHKDDEERFFPSS | | | | X | AAO88201.1 |
| 501 | 883 | NPVATEQYGVVADNL | | | | X | AAO88201.1 |
| 502 | 884 | PGVAMATHKDDEERF | | | | X | AAO88201.1 |
| 503 | 885 | RDSLVNPGVAMATHK | | | | X | AAO88201.1 |
| 504 | 886 | TTNPVATEQYGVVAD | | | | X | AAO88201.1 |
| 505 | 887 | VPADPPTTFSQAKLA | | | | X | AAO88201.1 |
| 506 | 888 | YFPSQMLRTGNNFEF | | | | X | AAO88201.1 |
| 507 | 889 | PSQMLRTGNNFEFSY | | | | X | AAO88201.1 |
| 508 | 890 | VLMFGKQGAGDNVDY | | | | X | AAV-Rh74 c |
| 509 | 891 | AGDNPYLRYHADAEF | | | | X | AAV-Rh74 c |
| 510 | 892 | AGDNVDYSSVMLTSE | | | | X | AAV-Rh74 c |
| 511 | 893 | FPSQMLRTGNFEFSY | | | | X | AAV-Rh74 c |
| 512 | 894 | IVGAVSQGALPGMVW | | | | X | AAV-Rh74 c |
| 513 | 895 | NWGFRPKRLNFLFNI | | | | X | AAV-Rh74 c |
| 514 | 896 | PVATEQYGWADNLQQ | | | | X | AAV-Rh74 c |
| 515 | 897 | EQYGWADNLQQQNAA | | | | X | AAV-Rh74 c |
| 516 | 898 | GPFNGLDKGEPVAAD | | | | X | AAV-Rh74 c |
| 517 | 899 | LVNPGVAMATHDDEE | | | | X | AAV-Rh74 c |
| 518 | 900 | LYYLSRTQSTGGTAG | | | | X | AAV-Rh74 c |
| 519 | 901 | NNMSAQAKNWLPGPC | | | | X | AAV-Rh74 c |
| 520 | 902 | YLGPFNGLDKGEPVA | | | | X | AAV-Rh74 c |
| 521 | 903 | ATEQYGWADNLQQQN | | | | X | AAV-Rh74 c |
| 522 | 904 | ATHDDEERFFPSSGV | | | | X | AAV-Rh74 c |
| 523 | 905 | CLEYFPSQMLRTGNF | | | | X | AAV-Rh74 c |
| 524 | 906 | DKGEPVAADAAALEH | | | | X | AAV-Rh74 c |
| 525 | 907 | FLFNIQVKEVTQNEG | | | | X | AAV-Rh74 c |
| 526 | 908 | GEPVAADAAALEHDK | | | | X | AAV-Rh74 c |
| 527 | 909 | LRYHADAEFQERLQE | | | | X | AAV-Rh74 c |
| 528 | 910 | NPGVAMATHDDEERF | | | | X | AAV-Rh74 c |
| 529 | 911 | PVAADAAALEHDKAY | | | | X | AAV-Rh74 c |
| 530 | 912 | QTGDSESVPDPQPIG | | | | X | AAV-Rh74 c |
| 531 | 913 | YHADAEFQERLQEDT | | | | X | AAV-Rh74 c |
| 532 | 914 | DPPTTFNQAKLASFI | | | | X | AAV-Rh74 c |
| 533 | 915 | GFRPKRLNFLFNIQV | | | | X | AAV-Rh74 c |
| 534 | 916 | GPNNMSAQAKNWLPG | | | | X | AAV-Rh74 c |
| 535 | 917 | GVAMATHDDEERFFP | | | | X | AAV-Rh74 c |
| 536 | 918 | KTTNPVATEQYGWAD | | | | X | AAV-Rh74 c |
| 537 | 919 | LEPLGLVESPVKTAP | | | | X | AAV-Rh74 c |
| 538 | 920 | LNFLFNIQVKEVTQN | | | | X | AAV-Rh74 c |
| 539 | 921 | NNNWGFRPKRLNFLF | | | | X | AAV-Rh74 c |
| 540 | 922 | PSSGVLMFGKQGAGD | | | | X | AAV-Rh74 c |
| 541 | 923 | PYLRYHADAEFQERL | | | | X | AAV-Rh74 c |
| 542 | 924 | RVLEPLGLVESPVKT | | | | X | AAV-Rh74 c |
| 543 | 925 | SPVKTAPGKKRPVEP | | | | X | AAV-Rh74 c |
| 544 | 926 | SQAGPNNMSAQAKNW | | | | X | AAV-Rh74 c |
| 545 | 927 | STGGTAGTQQLLFSQ | | | | X | AAV-Rh74 c |
| 546 | 928 | TGGTAGTQQLLFSQA | | | | X | AAV-Rh74 c |
| 547 | 929 | TNPVATEQYGWADNL | | | | X | AAV-Rh74 c |
| 548 | 930 | VESPVKTAPGKKRPV | | | | X | AAV-Rh74 c |
| 549 | 931 | VKTAPGKKRPVEPSP | | | | X | AAV-Rh74 c |
| 550 | 932 | VSQGALPGMVWQNRD | | | | X | AAV-Rh74 c |
| 551 | 933 | YLSRTQSTGGTAGTQ | | | | X | AAV-Rh74 c |
| 552 | 934 | YYLSRTQSTGGTAGT | | | | X | AAV-Rh74 c |
| 553 | 935 | NMSAQAKNWLPGPCY | | | | X | AAV-Rh74 c |
| 554 | 936 | GEPPAGPSGLGSGTM | | | | X | AAV-Rh74 c |
| 555 | 937 | SEEEIKTTNPVATEQ | | | | X | AAV-Rh74 c |
| 556 | 938 | NVDYSSVMLTSEEEI | | | | X | AAV-Rh74 c |
| 557 | 939 | FAVNTEGTYSEPRPI | | | | X | AAV-Rh74 c |
| 558 | 940 | SNYYKSTNVDFAVNT | | | | X | AAV-Rh74 c |
| 559 | 941 | TEGTYSEPRPIGTRY | | | | X | AAV-Rh74 c |
| 560 | 942 | ERFFPSSGVLMFGKQ | | | | X | AAV-Rh74 c |
| 561 | 943 | HLYKQISNGTSGGST | | | | X | AAV-Rh74 c |
| 562 | 944 | IGKKGQQPAKKRLNF | | | | X | AAV-Rh74 c |
| 563 | 945 | MSAQAKNWLPGPCYR | | | | X | AAV-Rh74 c |
| 564 | 946 | PDPQPIGEPPAGPSG | | | | X | AAV-Rh74 c |
| 565 | 947 | QYLYYLSRTQSTGGT | | | | X | AAV-Rh74 c |
| 566 | 948 | SVMLTSEEEIKTTNP | | | | X | AAV-Rh74 c |
| 567 | 949 | TLSQNNNSNFAWTGA | | | | X | AAV-Rh74 c |
| 568 | 950 | YYKSTNVDFAVNTEG | | | | X | AAV-Rh74 c |
| 569 | 951 | AGPSGLGSGTMAAGG | | | | X | AAV-Rh74 c |
| 570 | 952 | AQAKNWLPGPCYRQQ | | | | X | AAV-Rh74 c |
| 571 | 953 | CYRQQRVSTTLSQNN | | | | X | AAV-Rh74 c |
| 572 | 954 | DQYLYYLSRTQSTGG | | | | X | AAV-Rh74 c |
| 573 | 955 | DYSSVMLTSEEEIKT | | | | X | AAV-Rh74 c |
| 574 | 956 | GLGSGTMAAGGGAPM | | | | X | AAV-Rh74 c |
| 575 | 957 | GRDSLVNPGVAMATH | | | | X | AAV-Rh74 c |
| 576 | 958 | IDQYLYYLSRTQSTG | | | | X | AAV-Rh74 c |
| 577 | 959 | IQYTSNYYKSTNVDF | | | | X | AAV-Rh74 c |
| 578 | 960 | KKGQQPAKKRLNFGQ | | | | X | AAV-Rh74 c |
| 579 | 961 | KLASFITQYSTGQVS | | | | X | AAV-Rh74 c |
| 580 | 962 | KYHLNGRDSLVNPGV | | | | X | AAV-Rh74 c |
| 581 | 963 | LNGRDSLVNPGVAMA | | | | X | AAV-Rh74 c |
| 582 | 964 | NPEIQYTSNYYKSTN | | | | X | AAV-Rh74 c |
| 583 | 965 | PEIQYTSNYYKSTNV | | | | X | AAV-Rh74 c |
| 584 | 966 | PLIDQYLYYLSRTQS | | | | X | AAV-Rh74 c |
| 585 | 967 | QAKLASFITQYSTGQ | | | | X | AAV-Rh74 c |
| 586 | 968 | QISNGTSGGSTNDNT | | | | X | AAV-Rh74 c |
| 587 | 969 | QYTSNYYKSTNVDFA | | | | X | AAV-Rh74 c |
| 588 | 970 | RQQRVSTTLSQNNNS | | | | X | AAV-Rh74 c |
| 589 | 971 | SNGTSGGSTNDNTYF | | | | X | AAV-Rh74 c |
| 590 | 972 | SQNNNSNFAWTGATK | | | | X | AAV-Rh74 c |
| 591 | 973 | TGIGKKGQQPAKKRL | | | | X | AAV-Rh74 c |
| 592 | 974 | TSNYYKSTNVDFAVN | | | | X | AAV-Rh74 c |
| 593 | 975 | TTLSQNNNSNFAWTG | | | | X | AAV-Rh74 c |
| 594 | 976 | YKQISNGTSGGSTND | | | | X | AAV-Rh74 c |
| 595 | 977 | YRQQRVSTTLSQNNN | | | | X | AAV-Rh74 c |
| 596 | 978 | NNSNFAWTGATKYHL | | | | X | AAV-Rh74 c |
| 597 | 979 | GSTNDNTYFGYSTPW | | | | X | AAV-Rh74 c |
| 598 | 980 | DNGRGLVLPGYKYLG | | | | X | AAV-Rh74 c |
| 599 | 981 | NNNSNFAWTGATKYH | | | | X | AAV-Rh74 c |
| 600 | 982 | PKPKANQQKQDNGRG | | | | X | AAV-Rh74 c |
| 601 | 983 | QQKQDNGRGLVLPGY | | | | X | AAV-Rh74 c |
| 602 | 984 | SNFAWTGATKYHLNG | | | | X | AAV-Rh74 c |
| 603 | 985 | LAVPFKAQAQTGWVQ | | | | X | ALU85156.1 |
| 604 | 986 | QTLAVPFKAQAQTGW | | | | X | ALU85156.1 |
| 605 | 987 | SRTINGSGQNQQTLK | | | | X | ALU85156.1 |
| 606 | 988 | GETTRPARQAATADV | | | | X | AOD99651.1 |
| 607 | 989 | ALGETTRPARQAATA | | | | X | AOD99651.1 |
| 608 | 990 | GSVSTNLQRGNLALG | | | | X | AOD99651.1 |
| 609 | 991 | QYGSVSTNLQRGNLA | | | | X | AOD99651.1 |
| 610 | 992 | RPARQAATADVNTQG | | | | X | AOD99651.1 |
| 611 | 993 | TTRPARQAATADVNT | | | | X | AOD99651.1 |
| 612 | 994 | DNLQQQNLALGETTR | | | | X | AOD99652.1 |
| 613 | 995 | GETTRPATAPQIGTV | | | | X | AOD99652.1 |
| 614 | 996 | GIVADNLQQQNLALG | | | | X | AOD99652.1 |
| 615 | 997 | VADNLQQQNLALGET | | | | X | AOD99652.1 |
| 616 | 998 | RPATQAQTGLVHNQG | | | | X | AOD99654.1 |
| 617 | 999 | VADNLQQLALGETTR | | | | X | AOD99655.1 |
| 618 | 1000 | GETTRPAANTGPIVG | | | | X | AOD99655.1 |
| 619 | 1001 | RPAANTGPIVGNVNS | | | | X | AOD99655.1 |
| 620 | 1002 | TEQYGVVADNLQQLA | | | | X | AOD99655.1 |
| 621 | 1003 | TTRPAANTGPIVGNV | | | | X | AOD99655.1 |
| 622 | 1004 | VSSNLQAANLALGET | | | | X | AOD99656.1 |
| 623 | 1005 | GIVSSNLQAANLALG | | | | X | AOD99656.1 |
| 624 | 1006 | RPATAAQTQVVNNQG | | | | X | AOD99656.1 |
| 625 | 1007 | GETTRPASTTAPATG | | | | X | AOD99659.1 |
| 626 | 1008 | SLALGETTRPASTTA | | | | X | AOD99659.1 |
| 627 | 1009 | TTRPASTTAPATGTY | | | | X | AOD99659.1 |
| 628 | 1010 | VGGQMATNNQSLALG | | | | X | AOD99659.1 |
| 629 | 1011 | EAAKTAPGKKRPVEH | | | | X | pdb3J1QA |
| 630 | 1012 | APSGVGSLTMAAGGG | | | | X | pdb3J1QA |
| 631 | 1013 | GGTTNTQTLGFSQGG | | | | X | pdb3J1QA |
| 632 | 1014 | VGSLTMAAGGGAPMA | | | | X | pdb3J1QA |
| 633 | 1015 | GADGVGNSSGNWHCD | | | | X | P03135 |
| 634 | 1016 | ADAAALEHDKAYDRQ | | | | X | P03135 |
| 635 | 1017 | CLPPFPADVFMVPQY | | | | X | P03135 |
| 636 | 1018 | DKAYDRQLDSGDNPY | | | | X | P03135 |
| 637 | 1019 | EGADGVGNSSGNWHC | | | | X | P03135 |
| 638 | 1020 | NNEGADGVGNSSGNW | | | | X | P03135 |
| 639 | 1021 | YLPDWLEDTLSEGIR | | | | X | P03135 |
| 640 | 1022 | ALEHDKAYDRQLDSG | | | | X | P03135 |
| 641 | 1023 | DVNTQGVLPGMVWQD | | | | X | P03135 |
| 642 | 1024 | GPAMASHKDDEEKFF | | | | X | P03135 |
| 643 | 1025 | LPPFPADVFMVPQYG | | | | X | P03135 |
| 644 | 1026 | QRVSKTSADNNNSEY | | | | X | P03135 |
| 645 | 1027 | AADGYLPDWLEDTLS | | | | X | P03135 |
| 646 | 1028 | SSGNWHCDSTWMGDR | | | | X | P03135 |
| 647 | 1029 | FPADVFMVPQYGYLT | | | | X | P03135 |
| 648 | 1030 | GPFNGLDKGEPVNEA | | | | X | P03135 |
| 649 | 1031 | GVGNSSGNWHCDSTW | | | | X | P03135 |
| 650 | 1032 | NNLTSTVQVFTDSEY | | | | X | P03135 |
| 651 | 1033 | NPGPAMASHKDDEEK | | | | X | P03135 |
| 652 | 1034 | TAPGKKRPVEHSPVE | | | | X | P03135 |
| 653 | 1035 | VLPGMVWQDRDVYLQ | | | | X | P03135 |
| 654 | 1036 | VSKTSADNNNSEYSW | | | | X | P03135 |
| 655 | 1037 | AMASHKDDEEKFFPQ | | | | X | P03135 |
| 656 | 1038 | ATEQYGSVSTNLQRG | | | | X | P03135 |
| 657 | 1039 | DNNNSEYSWTGATKY | | | | X | P03135 |
| 658 | 1040 | DSVPDPQPLGQPPAA | | | | X | P03135 |
| 659 | 1041 | EKTNVDIEKVMITDE | | | | X | P03135 |
| 660 | 1042 | EVTQNDGTTTIANNL | | | | X | P03135 |
| 661 | 1043 | GNWHCDSTWMGDRVI | | | | X | P03135 |
| 662 | 1044 | KKRPVEHSPVEPDSS | | | | X | P03135 |
| 663 | 1045 | KPGPPPPKPAERHKD | | | | X | P03135 |
| 664 | 1046 | KTSADNNNSEYSWTG | | | | X | P03135 |
| 665 | 1047 | NEGADGVGNSSGNWH | | | | X | P03135 |
| 666 | 1048 | NLTSTVQVFTDSEYQ | | | | X | P03135 |
| 667 | 1049 | NTQGVLPGMVWQDRD | | | | X | P03135 |
| 668 | 1050 | RLNFGQTGDADSVPD | | | | X | P03135 |
| 669 | 1051 | SRLQFSQAGASDIRD | | | | X | P03135 |
| 670 | 1052 | TVQVFTDSEYQLPYV | | | | X | P03135 |
| 671 | 1053 | VQVFTDSEYQLPYVL | | | | X | P03135 |
| 672 | 1054 | WLEDTLSEGIRQWWK | | | | X | P03135 |
| 673 | 1055 | YNKSVNVDFTVDTNG | | | | X | P03135 |
| 674 | 1056 | ADGVGNSSGNWHCDS | | | | X | P03135 |
| 675 | 1057 | ADVFMVPQYGYLTLN | | | | X | P03135 |
| 676 | 1058 | ANNLTSTVQVFTDSE | | | | X | P03135 |
| 677 | 1059 | APSGLGTNTMATGSG | | | | X | P03135 |
| 678 | 1060 | FKLFNIQVKEVTQND | | | | X | P03135 |
| 679 | 1061 | GCLPPFPADVFMVPQ | | | | X | P03135 |
| 680 | 1062 | GIRQWWKLKPGPPPP | | | | X | P03135 |
| 681 | 1063 | GLDKGEPVNEADAAA | | | | X | P03135 |
| 682 | 1064 | KKRVLEPLGLVEEPV | | | | X | P03135 |
| 683 | 1065 | KQGSEKTNVDIEKVM | | | | X | P03135 |
| 684 | 1066 | KVMITDEEEIRTTNP | | | | X | P03135 |
| 685 | 1067 | LTSTVQVFTDSEYQL | | | | X | P03135 |
| 686 | 1068 | MADNNEGADGVGNSS | | | | X | P03135 |
| 687 | 1069 | PARKRLNFGQTGDAD | | | | X | P03135 |
| 688 | 1070 | PPPKPAERHKDDSRG | | | | X | P03135 |
| 689 | 1071 | SADNNNSEYSWTGAT | | | | X | P03135 |
| 690 | 1072 | TLSEGIRQWWKLKPG | | | | X | P03135 |
| 691 | 1073 | TNGVYSEPRPIGTRY | | | | X | P03135 |
| 692 | 1074 | TNTPSGTTTQSRLQF | | | | X | P03135 |
| 693 | 1075 | WMGDRVITTSTRTWA | | | | X | P03135 |
| 694 | 1076 | AATADVNTQGVLPGM | | | | X | P03135 |
| 695 | 1077 | AYDRQLDSGDNPYLK | | | | X | P03135 |
| 696 | 1078 | CDSTWMGDRVITTST | | | | X | P03135 |
| 697 | 1079 | DDSRGLVLPGYKYLG | | | | X | P03135 |
| 698 | 1080 | DPQPLGQPPAAPSGL | | | | X | P03135 |
| 699 | 1081 | EIRTTNPVATEQYGS | | | | X | P03135 |
| 700 | 1082 | FGKQGSEKTNVDIEK | | | | X | P03135 |
| 701 | 1083 | FTVDTNGVYSEPRPI | | | | X | P03135 |
| 702 | 1084 | GASDIRDQSRNWLPG | | | | X | P03135 |
| 703 | 1085 | GLVEEPVKTAPGKKR | | | | X | P03135 |
| 704 | 1086 | GNRQAATADVNTQGV | | | | X | P03135 |
| 705 | 1087 | GQTGDADSVPDPQPL | | | | X | P03135 |
| 706 | 1088 | GRDSLVNPGPAMASH | | | | X | P03135 |
| 707 | 1089 | GSGAPMADNNEGADG | | | | X | P03135 |
| 708 | 1090 | GVLIFGKQGSEKTNV | | | | X | P03135 |
| 709 | 1091 | HSPVEPDSSSGTGKA | | | | X | P03135 |
| 710 | 1092 | IQVKEVTQNDGTTTI | | | | X | P03135 |
| 711 | 1093 | IRDQSRNWLPGPCYR | | | | X | P03135 |
| 712 | 1094 | KEVTQNDGTTTIANN | | | | X | P03135 |
| 713 | 1095 | KGEPVNEADAAALEH | | | | X | P03135 |
| 714 | 1096 | KLFNIQVKEVTQNDG | | | | X | P03135 |
| 715 | 1097 | KLKPGPPPPKPAERH | | | | X | P03135 |
| 716 | 1098 | LEPLGLVEEPVKTAP | | | | X | P03135 |
| 717 | 1099 | LIFGKQGSEKTNVDI | | | | X | P03135 |
| 718 | 1100 | LNFKLFNIQVKEVTQ | | | | X | P03135 |
| 719 | 1101 | NFGQTGDADSVPDPQ | | | | X | P03135 |
| 720 | 1102 | NLQRGNRQAATADVN | | | | X | P03135 |
| 721 | 1103 | NTPVPANPSTTFSAA | | | | X | P03135 |
| 722 | 1104 | PAAPSGLGTNTMATG | | | | X | P03135 |
| 723 | 1105 | PAERHKDDSRGLVLP | | | | X | P03135 |
| 724 | 1106 | PGKKRPVEHSPVEPD | | | | X | P03135 |
| 725 | 1107 | PLIDQYLYYLSRTNT | | | | X | P03135 |
| 726 | 1108 | PMADNNEGADGVGNS | | | | X | P03135 |
| 727 | 1109 | PQILIKNTPVPANPS | | | | X | P03135 |
| 728 | 1110 | QAGASDIRDQSRNWL | | | | X | P03135 |
| 729 | 1111 | QISSQSGASNDNHYF | | | | X | P03135 |
| 730 | 1112 | QRGNRQAATADVNTQ | | | | X | P03135 |
| 731 | 1113 | QSGVLIFGKQGSEKT | | | | X | P03135 |
| 732 | 1114 | RKRLNFGQTGDADSV | | | | X | P03135 |
| 733 | 1115 | RQQRVSKTSADNNNS | | | | X | P03135 |
| 734 | 1116 | RTTNPVATEQYGSVS | | | | X | P03135 |
| 735 | 1117 | RVLEPLGLVEEPVKT | | | | X | P03135 |
| 736 | 1118 | SAAKFASFITQYSTG | | | | X | P03135 |
| 737 | 1119 | SEYSWTGATKYHLNG | | | | X | P03135 |
| 738 | 1120 | SGTTTQSRLQFSQAG | | | | X | P03135 |
| 739 | 1121 | SRGLVLPGYKYLGPF | | | | X | P03135 |
| 740 | 1122 | SSGTGKAGQQPARKR | | | | X | P03135 |
| 741 | 1123 | TFSAAKFASFITQYS | | | | X | P03135 |
| 742 | 1124 | TGDADSVPDPQPLGQ | | | | X | P03135 |
| 743 | 1125 | TNPVATEQYGSVSTN | | | | X | P03135 |
| 744 | 1126 | VFMVPQYGYLTLNNG | | | | X | P03135 |
| 745 | 1127 | VNEADAAALEHDKAY | | | | X | P03135 |
| 746 | 1128 | VPDPQPLGQPPAAPS | | | | X | P03135 |
| 747 | 1129 | WWKLKPGPPPPKPAE | | | | X | P03135 |
| 748 | 1130 | GATKYHLNGRDSLVN | | | | X | P03135 |
| 749 | 1131 | NFTFSYTFEDVPFHS | | | | X | O56137 |
| 750 | 1132 | RTGNNFTFSYTFEDV | | | | X | O56137 |
| 751 | 1133 | EPFGLVEEGAKTAPG | | | | X | O56137 |
| 752 | 1134 | PVATERFGTVAVNLQ | | | | X | O56137 |
| 753 | 1135 | DVHVMGALPGMVWQD | | | | X | O56137 |
| 754 | 1136 | ERFGTVAVNLQSSST | | | | X | O56137 |
| 755 | 1137 | MGGFGLKHPPPQILI | | | | X | O56137 |
| 756 | 1138 | AMASHKDDKDKFFPM | | | | X | O56137 |
| 757 | 1139 | DVPFHSSYAHSQSLD | | | | X | O56137 |
| 758 | 1140 | FGTVAVNLQSSSTDP | | | | X | O56137 |
| 759 | 1141 | FHPSPLMGGFGLKHP | | | | X | O56137 |
| 760 | 1142 | GLKHPPPQILIKNTP | | | | X | O56137 |
| 761 | 1143 | GRAVFQAKKRVLEPF | | | | X | O56137 |
| 762 | 1144 | HPSPLMGGFGLKHPP | | | | X | O56137 |
| 763 | 1145 | KDKFFPMSGVMIFGK | | | | X | O56137 |
| 764 | 1146 | KHPPPQILIKNTPVP | | | | X | O56137 |
| 765 | 1147 | LMGGFGLKHPPPQIL | | | | X | O56137 |
| 766 | 1148 | NLQSSSTDPATGDVH | | | | X | O56137 |
| 767 | 1149 | PSPLMGGFGLKHPPP | | | | X | O56137 |
| 768 | 1150 | TDPATGDVHVMGALP | | | | X | O56137 |
| 769 | 1151 | LPPFPADVFMIPQYG | | | | X | O56137 |
| 770 | 1152 | FDFNRFHCHFSPRDW | | | | X | O56137 |
| 771 | 1153 | PPFPADVFMIPQYGY | | | | X | O56137 |
| 772 | 1154 | HYFGYSTPWGYFDFN | | | | X | O56137 |
| 773 | 1155 | CLPPFPADVFMIPQY | | | | X | O56137 |
| 774 | 1156 | NNLTSTVQVFSDSEY | | | | X | O56137 |
| 775 | 1157 | SQAVGRSSFYCLEYF | | | | X | O56137 |
| 776 | 1158 | DNLSEGIREWWDLKP | | | | X | O56137 |
| 777 | 1159 | LDRLMNPLIDQYLYY | | | | X | O56137 |
| 778 | 1160 | PFPADVFMIPQYGYL | | | | X | O56137 |
| 779 | 1161 | QAVGRSSFYCLEYFP | | | | X | O56137 |
| 780 | 1162 | QGCLPPFPADVFMIP | | | | X | O56137 |
| 781 | 1163 | GADGVGNASGNWHCD | | | | X | O56137 |
| 782 | 1164 | NLSEGIREWWDLKPG | | | | X | O56137 |
| 783 | 1165 | RSSFYCLEYFPSQML | | | | X | O56137 |
| 784 | 1166 | TDGHFHPSPLMGGFG | | | | X | O56137 |
| 785 | 1167 | VDFTVDNNGLYTEPR | | | | X | O56137 |
| 786 | 1168 | AADGYLPDWLEDNLS | | | | X | O56137 |
| 787 | 1169 | ANVDFTVDNNGLYTE | | | | X | O56137 |
| 788 | 1170 | FPADVFMIPQYGYLT | | | | X | O56137 |
| 789 | 1171 | LPDWLEDNLSEGIRE | | | | X | O56137 |
| 790 | 1172 | MAADGYLPDWLEDNL | | | | X | O56137 |
| 791 | 1173 | SNDNHYFGYSTPWGY | | | | X | O56137 |
| 792 | 1174 | VLPGYKYLGPFNGLD | | | | X | O56137 |
| 793 | 1175 | WGYFDFNRFHCHFSP | | | | X | O56137 |
| 794 | 1176 | EVTTNDGVTTIANNL | | | | X | O56137 |
| 795 | 1177 | GNWHCDSTWLGDRVI | | | | X | O56137 |
| 796 | 1178 | NDNHYFGYSTPWGYF | | | | X | O56137 |
| 797 | 1179 | PAEFSATKFASFITQ | | | | X | O56137 |
| 798 | 1180 | PYLRYNHADAEFQER | | | | X | O56137 |
| 799 | 1181 | YNHADAEFQERLQED | | | | X | O56137 |
| 800 | 1182 | DFNRFHCHFSPRDWQ | | | | X | O56137 |
| 801 | 1183 | DNPYLRYNHADAEFQ | | | | X | O56137 |
| 802 | 1184 | DRLMNPLIDQYLYYL | | | | X | O56137 |
| 803 | 1185 | GRSSFYCLEYFPSQM | | | | X | O56137 |
| 804 | 1186 | HQGCLPPFPADVFMI | | | | X | O56137 |
| 805 | 1187 | MGALPGMVWQDRDVY | | | | X | O56137 |
| 806 | 1188 | PHTDGHFHPSPLMGG | | | | X | O56137 |
| 807 | 1189 | QTGDSESVPDPQPLG | | | | X | O56137 |
| 808 | 1190 | SVEIEWELQKENSKR | | | | X | O56137 |
| 809 | 1191 | VGRSSFYCLEYFPSQ | | | | X | O56137 |
| 810 | 1192 | VQVFSDSEYQLPYVL | | | | X | O56137 |
| 811 | 1193 | YKYLGPFNGLDKGEP | | | | X | O56137 |
| 812 | 1194 | DGVGNASGNWHCDST | | | | X | O56137 |
| 813 | 1195 | GDNPYLRYNHADAEF | | | | X | O56137 |
| 814 | 1196 | GGGAPMADNNEGADG | | | | X | O56137 |
| 815 | 1197 | GQVSVEIEWELQKEN | | | | X | O56137 |
| 816 | 1198 | KGEPVNAADAAALEH | | | | X | O56137 |
| 817 | 1199 | LGPFNGLDKGEPVNA | | | | X | O56137 |
| 818 | 1200 | LTSTVQVFSDSEYQL | | | | X | O56137 |
| 819 | 1201 | NASGNWHCDSTWLGD | | | | X | O56137 |
| 820 | 1202 | NNGLYTEPRPIGTRY | | | | X | O56137 |
| 821 | 1203 | PDPQPLGEPPATPAA | | | | X | O56137 |
| 822 | 1204 | QSLDRLMNPLIDQYL | | | | X | O56137 |
| 823 | 1205 | SQSLDRLMNPLIDQY | | | | X | O56137 |
| 824 | 1206 | VEEGAKTAPGKKRPV | | | | X | O56137 |
| 825 | 1207 | ADAEFQERLQEDTSF | | | | X | O56137 |
| 826 | 1208 | ADVFMIPQYGYLTLN | | | | X | O56137 |
| 827 | 1209 | GMVWQDRDVYLQGPI | | | | X | O56137 |
| 828 | 1210 | IDQYLYYLNRTQNQS | | | | X | O56137 |
| 829 | 1211 | KLFNIQVKEVTTNDG | | | | X | O56137 |
| 830 | 1212 | KRPVEQSPQEPDSSS | | | | X | O56137 |
| 831 | 1213 | KTKTDNNNSNFTWTG | | | | X | O56137 |
| 832 | 1214 | KYLGPFNGLDKGEPV | | | | X | O56137 |
| 833 | 1215 | NAADAAALEHDKAYD | | | | X | O56137 |
| 834 | 1216 | NTPVPANPPAEFSAT | | | | X | O56137 |
| 835 | 1217 | PVNAADAAALEHDKA | | | | X | O56137 |
| 836 | 1218 | PWGYFDFNRFHCHFS | | | | X | O56137 |
| 837 | 1219 | QEDTSFGGNLGRAVF | | | | X | O56137 |
| 838 | 1220 | SAHQGCLPPFPADVF | | | | X | O56137 |
| 839 | 1221 | SGGGAPMADNNEGAD | | | | X | O56137 |
| 840 | 1222 | TGQVSVEIEWELQKE | | | | X | O56137 |
| 841 | 1223 | VFSDSEYQLPYVLGS | | | | X | O56137 |
| 842 | 1224 | VSKTKTDNNNSNFTW | | | | X | O56137 |
| 843 | 1225 | VWQDRDVYLQGPIWA | | | | X | O56137 |
| 844 | 1226 | YLGPFNGLDKGEPVN | | | | X | O56137 |
| 845 | 1227 | AALEHDKAYDQQLKA | | | | X | O56137 |
| 846 | 1228 | ADAAALEHDKAYDQQ | | | | X | O56137 |
| 847 | 1229 | AEFQERLQEDTSFGG | | | | X | O56137 |
| 848 | 1230 | AVGRSSFYCLEYFPS | | | | X | O56137 |
| 849 | 1231 | DDGRGLVLPGYKYLG | | | | X | O56137 |
| 850 | 1232 | DNNNSNFTWTGASKY | | | | X | O56137 |
| 851 | 1233 | ESIINPGTAMASHKD | | | | X | O56137 |
| 852 | 1234 | FGQTGDSESVPDPQP | | | | X | O56137 |
| 853 | 1235 | FNRFHCHFSPRDWQR | | | | X | O56137 |
| 854 | 1236 | FQERLQEDTSFGGNL | | | | X | O56137 |
| 855 | 1237 | FRPKRLNFKLFNIQV | | | | X | O56137 |
| 856 | 1238 | FSPRDWQRLINNNWG | | | | X | O56137 |
| 857 | 1239 | FTVDNNGLYTEPRPI | | | | X | O56137 |
| 858 | 1240 | FTWTGASKYNLNGRE | | | | X | O56137 |
| 859 | 1241 | GAPKPKANQQKQDDG | | | | X | O56137 |
| 860 | 1242 | GAPMADNNEGADGVG | | | | X | O56137 |
| 861 | 1243 | GASNTALDNVMITDE | | | | X | O56137 |
| 862 | 1244 | GHFHPSPLMGGFGLK | | | | X | O56137 |
| 863 | 1245 | GLDKGEPVNAADAAA | | | | X | O56137 |
| 864 | 1246 | GRGLVLPGYKYLGPF | | | | X | O56137 |
| 865 | 1247 | GYFDFNRFHCHFSPR | | | | X | O56137 |
| 866 | 1248 | GYKYLGPFNGLDKGE | | | | X | O56137 |
| 867 | 1249 | IEWELQKENSKRWNP | | | | X | O56137 |
| 868 | 1250 | IREWWDLKPGAPKPK | | | | X | O56137 |
| 869 | 1251 | KIPHTDGHFHPSPLM | | | | X | O56137 |
| 870 | 1252 | KKRPVEQSPQEPDSS | | | | X | O56137 |
| 871 | 1253 | KQDDGRGLVLPGYKY | | | | X | O56137 |
| 872 | 1254 | KTDNNNSNFTWTGAS | | | | X | O56137 |
| 873 | 1255 | LDKGEPVNAADAAAL | | | | X | O56137 |
| 874 | 1256 | LEHDKAYDQQLKAGD | | | | X | O56137 |
| 875 | 1257 | LEYFPSQMLRTGNNF | | | | X | O56137 |
| 876 | 1258 | LKPGAPKPKANQQKQ | | | | X | O56137 |
| 877 | 1259 | MASGGGAPMADNNEG | | | | X | O56137 |
| 878 | 1260 | NEGADGVGNASGNWH | | | | X | O56137 |
| 879 | 1261 | NGLDKGEPVNAADAA | | | | X | O56137 |
| 880 | 1262 | NGSQAVGRSSFYCLE | | | | X | O56137 |
| 881 | 1263 | NNSNFTWTGASKYNL | | | | X | O56137 |
| 882 | 1264 | NNWGFRPKRLNFKLF | | | | X | O56137 |
| 883 | 1265 | NPYLRYNHADAEFQE | | | | X | O56137 |
| 884 | 1266 | NVMITDEEEIKATNP | | | | X | O56137 |
| 885 | 1267 | NWGFRPKRLNFKLFN | | | | X | O56137 |
| 886 | 1268 | PADVFMIPQYGYLTL | | | | X | O56137 |
| 887 | 1269 | PDSSSGIGKTGQQPA | | | | X | O56137 |
| 888 | 1270 | PFNGLDKGEPVNAAD | | | | X | O56137 |
| 889 | 1271 | PGKKRPVEQSPQEPD | | | | X | O56137 |
| 890 | 1272 | PGYKYLGPFNGLDKG | | | | X | O56137 |
| 891 | 1273 | PIWAKIPHTDGHFHP | | | | X | O56137 |
| 892 | 1274 | PQILIKNTPVPANPP | | | | X | O56137 |
| 893 | 1275 | QEPDSSSGIGKTGQQ | | | | X | O56137 |
| 894 | 1276 | QISSASTGASNDNHY | | | | X | O56137 |
| 895 | 1277 | QQKQDDGRGLVLPGY | | | | X | O56137 |
| 896 | 1278 | REWWDLKPGAPKPKA | | | | X | O56137 |
| 897 | 1279 | RLMNPLIDQYLYYLN | | | | X | O56137 |
| 898 | 1280 | RLNFKLFNIQVKEVT | | | | X | O56137 |
| 899 | 1281 | SEYQLPYVLGSAHQG | | | | X | O56137 |
| 900 | 1282 | SGNWHCDSTWLGDRV | | | | X | O56137 |
| 901 | 1283 | SPRDWQRLINNNWGF | | | | X | O56137 |
| 902 | 1284 | STGQVSVEIEWELQK | | | | X | O56137 |
| 903 | 1285 | STPWGYFDFNRFHCH | | | | X | O56137 |
| 904 | 1286 | TALDNVMITDEEEIK | | | | X | O56137 |
| 905 | 1287 | TGDSESVPDPQPLGE | | | | X | O56137 |
| 906 | 1288 | VGNASGNWHCDSTWL | | | | X | O56137 |
| 907 | 1289 | WAKIPHTDGHFHPSP | | | | X | O56137 |
| 908 | 1290 | WELQKENSKRWNPEV | | | | X | O56137 |
| 909 | 1291 | YTEPRPIGTRYLTRP | | | | X | O56137 |
| 910 | 1292 | AGMSVQPKNWLPGPC | | | | X | O56137 |
| 911 | 1293 | AHSQSLDRLMNPLID | | | | X | O56137 |
| 912 | 1294 | APGKKRPVEQSPQEP | | | | X | O56137 |
| 913 | 1295 | APKPKANQQKQDDGR | | | | X | O56137 |
| 914 | 1296 | CDSTWLGDRVITTST | | | | X | O56137 |
| 915 | 1297 | CLEYFPSQMLRTGNN | | | | X | O56137 |
| 916 | 1298 | DGRGLVLPGYKYLGP | | | | X | O56137 |
| 917 | 1299 | DKAYDQQLKAGDNPY | | | | X | O56137 |
| 918 | 1300 | DQQLKAGDNPYLRYN | | | | X | O56137 |
| 919 | 1301 | DRDVYLQGPIWAKIP | | | | X | O56137 |
| 920 | 1302 | FPSQMLRTGNNFTFS | | | | X | O56137 |
| 921 | 1303 | GASKYNLNGRESIIN | | | | X | O56137 |
| 922 | 1304 | GDRVITTSTRTWALP | | | | X | O56137 |
| 923 | 1305 | GFRPKRLNFKLFNIQ | | | | X | O56137 |
| 924 | 1306 | GIREWWDLKPGAPKP | | | | X | O56137 |
| 925 | 1307 | GLVEEGAKTAPGKKR | | | | X | O56137 |
| 926 | 1308 | GLVLPGYKYLGPFNG | | | | X | O56137 |
| 927 | 1309 | GLYTEPRPIGTRYLT | | | | X | O56137 |
| 928 | 1310 | GNLGRAVFQAKKRVL | | | | X | O56137 |
| 929 | 1311 | GQTGDSESVPDPQPL | | | | X | O56137 |
| 930 | 1312 | GRESIINPGTAMASH | | | | X | O56137 |
| 931 | 1313 | HADAEFQERLQEDTS | | | | X | O56137 |
| 932 | 1314 | HFSPRDWQRLINNNW | | | | X | O56137 |
| 933 | 1315 | IKNTPVPANPPAEFS | | | | X | O56137 |
| 934 | 1316 | KANQQKQDDGRGLVL | | | | X | O56137 |
| 935 | 1317 | KPGAPKPKANQQKQD | | | | X | O56137 |
| 936 | 1318 | KPKANQQKQDDGRGL | | | | X | O56137 |
| 937 | 1319 | KRLNFGQTGDSESVP | | | | X | O56137 |
| 938 | 1320 | LDNVMITDEEEIKAT | | | | X | O56137 |
| 939 | 1321 | LGRAVFQAKKRVLEP | | | | X | O56137 |
| 940 | 1322 | LNFGQTGDSESVPDP | | | | X | O56137 |
| 941 | 1323 | LNGRESIINPGTAMA | | | | X | O56137 |
| 942 | 1324 | LNNGSQAVGRSSFYC | | | | X | O56137 |
| 943 | 1325 | LPGYKYLGPFNGLDK | | | | X | O56137 |
| 944 | 1326 | LPTYNNHLYKQISSA | | | | X | O56137 |
| 945 | 1327 | LRYNHADAEFQERLQ | | | | X | O56137 |
| 946 | 1328 | LVEEGAKTAPGKKRP | | | | X | O56137 |
| 947 | 1329 | MLRTGNNFTFSYTFE | | | | X | O56137 |
| 948 | 1330 | NFKLFNIQVKEVTTN | | | | X | O56137 |
| 949 | 1331 | NHADAEFQERLQEDT | | | | X | O56137 |
| 950 | 1332 | NLGRAVFQAKKRVLE | | | | X | O56137 |
| 951 | 1333 | PFHSSYAHSQSLDRL | | | | X | O56137 |
| 952 | 1334 | PKRLNFKLFNIQVKE | | | | X | O56137 |
| 953 | 1335 | PPATPAAVGPTTMAS | | | | X | O56137 |
| 954 | 1336 | PPPQILIKNTPVPAN | | | | X | O56137 |
| 955 | 1337 | PQYGYLTLNNGSQAV | | | | X | O56137 |
| 956 | 1338 | PRDWQRLINNNWGFR | | | | X | O56137 |
| 957 | 1339 | PYVLGSAHQGCLPPF | | | | X | O56137 |
| 958 | 1340 | QDDGRGLVLPGYKYL | | | | X | O56137 |
| 959 | 1341 | QDRDVYLQGPIWAKI | | | | X | O56137 |
| 960 | 1342 | QERLQEDTSFGGNLG | | | | X | O56137 |
| 961 | 1343 | QRLINNNWGFRPKRL | | | | X | O56137 |
| 962 | 1344 | QYLYYLNRTQNQSGS | | | | X | O56137 |
| 963 | 1345 | RDVYLQGPIWAKIPH | | | | X | O56137 |
| 964 | 1346 | RDWQRLINNNWGFRP | | | | X | O56137 |
| 965 | 1347 | RGSPAGMSVQPKNWL | | | | X | O56137 |
| 966 | 1348 | RLNFGQTGDSESVPD | | | | X | O56137 |
| 967 | 1349 | RLQEDTSFGGNLGRA | | | | X | O56137 |
| 968 | 1350 | RQQRVSKTKTDNNNS | | | | X | O56137 |
| 969 | 1351 | SEGIREWWDLKPGAP | | | | X | O56137 |
| 970 | 1352 | SKYNLNGRESIINPG | | | | X | O56137 |
| 971 | 1353 | SNFTWTGASKYNLNG | | | | X | O56137 |
| 972 | 1354 | SSFYCLEYFPSQMLR | | | | X | O56137 |
| 973 | 1355 | STRTWALPTYNNHLY | | | | X | O56137 |
| 974 | 1356 | TNPVATERFGTVAVN | | | | X | O56137 |
| 975 | 1357 | TSTRTWALPTYNNHL | | | | X | O56137 |
| 976 | 1358 | TTMASGGGAPMADNN | | | | X | O56137 |
| 977 | 1359 | TWLGDRVITTSTRTW | | | | X | O56137 |
| 978 | 1360 | TYNNHLYKQISSAST | | | | X | O56137 |
| 979 | 1361 | VDNNGLYTEPRPIGT | | | | X | O56137 |
| 980 | 1362 | VFMIPQYGYLTLNNG | | | | X | O56137 |
| 981 | 1363 | VNAADAAALEHDKAY | | | | X | O56137 |
| 982 | 1364 | VPFHSSYAHSQSLDR | | | | X | O56137 |
| 983 | 1365 | VQYTSNYAKSANVDF | | | | X | O56137 |
| 984 | 1366 | WGFRPKRLNFKLFNI | | | | X | O56137 |
| 985 | 1367 | WLGDRVITTSTRTWA | | | | X | O56137 |
| 986 | 1368 | WQDRDVYLQGPIWAK | | | | X | O56137 |
| 987 | 1369 | WQRLINNNWGFRPKR | | | | X | O56137 |
| 988 | 1370 | YAKSANVDFTVDNNG | | | | X | O56137 |
| 989 | 1371 | YGYLTLNNGSQAVGR | | | | X | O56137 |
| 990 | 1372 | YLNRTQNQSGSAQNK | | | | X | O56137 |
| 991 | 1373 | YLRYNHADAEFQERL | | | | X | O56137 |
| 992 | 1374 | YNLNGRESIINPGTA | | | | X | O56137 |
| 993 | 1375 | FQFSYTFEDVPFHSS | | | | X | 056139 |
| 994 | 1376 | QGALPGMVWQDRDVY | | | | X | 056139 |
| 995 | 1377 | NDQGALPGMVWQDRD | | | | X | 056139 |
| 996 | 1378 | EIRTTNPVATEQYGT | | | | X | 056139 |
| 997 | 1379 | EQYGTVANNLQSSNT | | | | X | 056139 |
| 998 | 1380 | PGNGLDKGEPVNEAD | | | | X | 056139 |
| 999 | 1381 | GEPPAAPTSLGSNTM | | | | X | 056139 |
| 1000 | 1382 | GSNTMASGGGAPMAD | | | | X | 056139 |
| 1001 | 1383 | NTMASGGGAPMADNN | | | | X | 056139 |
| 1002 | 1384 | PTTRTVNDQGALPGM | | | | X | 056139 |
| 1003 | 1385 | LGPGNGLDKGEPVNE | | | | X | 056139 |
| 1004 | 1386 | PDPQPLGEPPAAPTS | | | | X | 056139 |
| 1005 | 1387 | PVATEQYGTVANNLQ | | | | X | 056139 |
| 1006 | 1388 | QSMSLQARNWLPGPC | | | | X | 056139 |
| 1007 | 1389 | SGVGKSGKQPARKRL | | | | X | 056139 |
| 1008 | 1390 | TFSPAKFASFITQYS | | | | X | 056139 |
| 1009 | 1391 | TVNDQGALPGMVWQD | | | | X | 056139 |
| 1010 | 1392 | VGNSSGNWHCDSQWL | | | | X | 056139 |
| 1011 | 1393 | EWWALKPGVPQPKAN | | | | X | 056139 |
| 1012 | 1394 | FPWTAASKYHLNGRD | | | | X | 056139 |
| 1013 | 1395 | LINNNWGFRPKKLSF | | | | X | 056139 |
| 1014 | 1396 | MGGFGLKHPPPQIMI | | | | X | 056139 |
| 1015 | 1397 | NPPTTFSPAKFASFI | | | | X | 056139 |
| 1016 | 1398 | NWGFRPKKLSFKLFN | | | | X | 056139 |
| 1017 | 1399 | TNPVATEQYGTVANN | | | | X | 056139 |
| 1018 | 1400 | AAKTAPGKKRPVDQS | | | | X | 056139 |
| 1019 | 1401 | AAPTSLGSNTMASGG | | | | X | 056139 |
| 1020 | 1402 | AASKYHLNGRDSLVN | | | | X | 056139 |
| 1021 | 1403 | ANNLQSSNTAPTTRT | | | | X | 056139 |
| 1022 | 1404 | DQSPQEPDSSSGVGK | | | | X | 056139 |
| 1023 | 1405 | EGIREWWALKPGVPQ | | | | X | 056139 |
| 1024 | 1406 | GKQPARKRLNFGQTG | | | | X | 056139 |
| 1025 | 1407 | GPQSMSLQARNWLPG | | | | X | 056139 |
| 1026 | 1408 | GRAVFQAKKRILEPL | | | | X | 056139 |
| 1027 | 1409 | IKNTPVPANPPTTFS | | | | X | 056139 |
| 1028 | 1410 | IREWWALKPGVPQPK | | | | X | 056139 |
| 1029 | 1411 | KRILEPLGLVEEAAK | | | | X | 056139 |
| 1030 | 1412 | LKPGVPQPKANQQHQ | | | | X | 056139 |
| 1031 | 1413 | NLGRAVFQAKKRILE | | | | X | 056139 |
| 1032 | 1414 | PANPPTTFSPAKFAS | | | | X | 056139 |
| 1033 | 1415 | PQIMIKNTPVPANPP | | | | X | 056139 |
| 1034 | 1416 | QEPDSSSGVGKSGKQ | | | | X | 056139 |
| 1035 | 1417 | SKYHLNGRDSLVNPG | | | | X | 056139 |
| 1036 | 1418 | SLGSNTMASGGGAPM | | | | X | 056139 |
| 1037 | 1419 | SNTAPTTRTVNDQGA | | | | X | 056139 |
| 1038 | 1420 | TAPTTRTVNDQGALP | | | | X | 056139 |
| 1039 | 1421 | HKDDEEKFFPMHGNL | | | | X | 056139 |
| 1040 | 1422 | ASHKDDEEKFFPMHG | | | | X | 056139 |
| 1041 | 1423 | KFFPMHGNLIFGKEG | | | | X | 056139 |
| 1042 | 1424 | NVMITDEEEIRTTNP | | | | X | 056139 |
| 1043 | 1425 | AMASHKDDEEKFFPM | | | | X | 056139 |
| 1044 | 1426 | LDNVMITDEEEIRTT | | | | X | 056139 |
| 1045 | 1427 | FGKEGTTASNAELDN | | | | X | 056139 |
| 1046 | 1428 | KTANDNNNSNFPWTA | | | | X | 056139 |
| 1047 | 1429 | RQQRLSKTANDNNNS | | | | X | 056139 |
| 1048 | 1430 | DNNNSNFPWTAASKY | | | | X | 056139 |
| 1049 | 1431 | FPMHGNLIFGKEGTT | | | | X | 056139 |
| 1050 | 1432 | GNLIFGKEGTTASNA | | | | X | 056139 |
| 1051 | 1433 | KEGTTASNAELDNVM | | | | X | 056139 |
| 1052 | 1434 | LSKTANDNNNSNFPW | | | | X | 056139 |
| 1053 | 1435 | QGTTSGTTNQSRLLF | | | | X | 056139 |
| 1054 | 1436 | TASNAELDNVMITDE | | | | X | 056139 |
| 1055 | 1437 | YLYYLNRTQGTTSGT | | | | X | 056139 |
| 1056 | 1438 | YYLNRTQGTTSGTTN | | | | X | 056139 |
| 1057 | 1439 | QRLINNNWGFRPKKL | | | | X | 056139 |
| 1058 | 1440 | DGNFHPSPLMGGFGM | | | | X | Q6JC40 |
| 1059 | 1441 | GEDRFFPLSGSLIFG | | | | X | Q6JC40 |
| 1060 | 1442 | LEDNLSEGIREWWAL | | | | X | Q6JC40 |
| 1061 | 1443 | NDNAYFGYSTPWGYF | | | | X | Q6JC40 |
| 1062 | 1444 | NFQFSYEFENVPFHS | | | | X | Q6JC40 |
| 1063 | 1445 | NNLTSTVQVFTDSDY | | | | X | Q6JC40 |
| 1064 | 1446 | QGILPGMVWQDRDVY | | | | X | Q6JC40 |
| 1065 | 1447 | EGVYSEPRPIGTRYL | | | | X | Q6JC40 |
| 1066 | 1448 | GILPGMVWQDRDVYL | | | | X | Q6JC40 |
| 1067 | 1449 | NSEFAWPGASSWALN | | | | X | Q6JC40 |
| 1068 | 1450 | PYLKYNHADAEFQER | | | | X | Q6JC40 |
| 1069 | 1451 | KEGEDRFFPLSGSLI | | | | X | Q6JC40 |
| 1070 | 1452 | PGPAMASHKEGEDRF | | | | X | Q6JC40 |
| 1071 | 1453 | QAKKRLLEPLGLVEE | | | | X | Q6JC40 |
| 1072 | 1454 | QNQGILPGMVWQDRD | | | | X | Q6JC40 |
| 1073 | 1455 | EGADGVGSSSGNWHC | | | | X | Q6JC40 |
| 1074 | 1456 | HEGCLPPFPADVFMI | | | | X | Q6JC40 |
| 1075 | 1457 | LVEEAAKTAPGKKRP | | | | X | Q6JC40 |
| 1076 | 1458 | NQGILPGMVWQDRDV | | | | X | Q6JC40 |
| 1077 | 1459 | EVTDNNGVKTIANNL | | | | X | Q6JC40 |
| 1078 | 1460 | GADGVGSSSGNWHCD | | | | X | Q6JC40 |
| 1079 | 1461 | LTSTVQVFTDSDYQL | | | | X | Q6JC40 |
| 1080 | 1462 | NEGADGVGSSSGNWH | | | | X | Q6JC40 |
| 1081 | 1463 | NPVATESYGQVATNH | | | | X | Q6JC40 |
| 1082 | 1464 | NVDADKVMITNEEEI | | | | X | Q6JC40 |
| 1083 | 1465 | PVADNNEGADGVGSS | | | | X | Q6JC40 |
| 1084 | 1466 | SAHEGCLPPFPADVF | | | | X | Q6JC40 |
| 1085 | 1467 | TGDTESVPDPQPIGE | | | | X | Q6JC40 |
| 1086 | 1468 | TMASGGGAPVADNNE | | | | X | Q6JC40 |
| 1087 | 1469 | VEQSPQEPDSSAGIG | | | | X | Q6JC40 |
| 1088 | 1470 | VQVFTDSDYQLPYVL | | | | X | Q6JC40 |
| 1089 | 1471 | EPLGLVEEAAKTAPG | | | | X | Q6JC40 |
| 1090 | 1472 | EPPAAPSGVGSLTMA | | | | X | Q6JC40 |
| 1091 | 1473 | FNKDKLNSFITQYST | | | | X | Q6JC40 |
| 1092 | 1474 | GAPVADNNEGADGVG | | | | X | Q6JC40 |
| 1093 | 1475 | GGGAPVADNNEGADG | | | | X | Q6JC40 |
| 1094 | 1476 | IFGKQGTGRDNVDAD | | | | X | Q6JC40 |
| 1095 | 1477 | ILPGMVWQDRDVYLQ | | | | X | Q6JC40 |
| 1096 | 1478 | MGGFGMKHPPPQILI | | | | X | Q6JC40 |
| 1097 | 1479 | PPQILIKNTPVPADP | | | | X | Q6JC40 |
| 1098 | 1480 | RAVFQAKKRLLEPLG | | | | X | Q6JC40 |
| 1099 | 1481 | RDNVDADKVMITNEE | | | | X | Q6JC40 |
| 1100 | 1482 | SNNVEFAVNTEGVYS | | | | X | Q6JC40 |
| 1101 | 1483 | TEGVYSEPRPIGTRY | | | | X | Q6JC40 |
| 1102 | 1484 | TSGGSSNDNAYFGYS | | | | X | Q6JC40 |
| 1103 | 1485 | TVTQNNNSEFAWPGA | | | | X | Q6JC40 |
| 1104 | 1486 | VLPGYKYLGPGNGLD | | | | X | Q6JC40 |
| 1105 | 1487 | ADPPTAFNKDKLNSF | | | | X | Q6JC40 |
| 1106 | 1488 | ALNGRNSLMNPGPAM | | | | X | Q6JC40 |
| 1107 | 1489 | APSGVGSLTMASGGG | | | | X | Q6JC40 |
| 1108 | 1490 | DNLSEGIREWWALKP | | | | X | Q6JC40 |
| 1109 | 1491 | DPPTAFNKDKLNSFI | | | | X | Q6JC40 |
| 1110 | 1492 | DSQWLGDRVITTSTR | | | | X | Q6JC40 |
| 1111 | 1493 | DSSAGIGKSGAQPAK | | | | X | Q6JC40 |
| 1112 | 1494 | DVFMIPQYGYLTLND | | | | X | Q6JC40 |
| 1113 | 1495 | GIGKSGAQPAKKRLN | | | | X | Q6JC40 |
| 1114 | 1496 | GKQGTGRDNVDADKV | | | | X | Q6JC40 |
| 1115 | 1497 | GNFHPSPLMGGFGMK | | | | X | Q6JC40 |
| 1116 | 1498 | GVGSSSGNWHCDSQW | | | | X | Q6JC40 |
| 1117 | 1499 | ISNSTSGGSSNDNAY | | | | X | Q6JC40 |
| 1118 | 1500 | KLNSFITQYSTGQVS | | | | X | Q6JC40 |
| 1119 | 1501 | KNTPVPADPPTAFNK | | | | X | Q6JC40 |
| 1120 | 1502 | KYLGPGNGLDKGEPV | | | | X | Q6JC40 |
| 1121 | 1503 | LGRAVFQAKKRLLEP | | | | X | Q6JC40 |
| 1122 | 1504 | LGSAHEGCLPPFPAD | | | | X | Q6JC40 |
| 1123 | 1505 | MNPGPAMASHKEGED | | | | X | Q6JC40 |
| 1124 | 1506 | NMAVQGRNYIPGPSY | | | | X | Q6JC40 |
| 1125 | 1507 | NNEGADGVGSSSGNW | | | | X | Q6JC40 |
| 1126 | 1508 | NWHCDSQWLGDRVIT | | | | X | Q6JC40 |
| 1127 | 1509 | PAMASHKEGEDRFFP | | | | X | Q6JC40 |
| 1128 | 1510 | PEIQYTSNYYKSNNV | | | | X | Q6JC40 |
| 1129 | 1511 | QQRVSTTVTQNNNSE | | | | X | Q6JC40 |
| 1130 | 1512 | RLLEPLGLVEEAAKT | | | | X | Q6JC40 |
| 1131 | 1513 | RPVEQSPQEPDSSAG | | | | X | Q6JC40 |
| 1132 | 1514 | TAFNKDKLNSFITQY | | | | X | Q6JC40 |
| 1133 | 1515 | TGWVQNQGILPGMVW | | | | X | Q6JC40 |
| 1134 | 1516 | TQNNNSEFAWPGASS | | | | X | Q6JC40 |
| 1135 | 1517 | VKEVTDNNGVKTIAN | | | | X | Q6JC40 |
| 1136 | 1518 | VPDPQPIGEPPAAPS | | | | X | Q6JC40 |
| 1137 | 1519 | VQNQGILPGMVWQDR | | | | X | Q6JC40 |
| 1138 | 1520 | YFPSQMLRTGNNFQF | | | | X | Q6JC40 |
| 1139 | 1521 | YVLGSAHEGCLPPFP | | | | X | Q6JC40 |
| 1140 | 1522 | ADGVGSSSGNWHCDS | | | | X | Q6JC40 |
| 1141 | 1523 | ANQQHQDNARGLVLP | | | | X | Q6JC40 |
| 1142 | 1524 | AQPAKKRLNFGQTGD | | | | X | Q6JC40 |
| 1143 | 1525 | ARGLVLPGYKYLGPG | | | | X | Q6JC40 |
| 1144 | 1526 | ASSWALNGRNSLMNP | | | | X | Q6JC40 |
| 1145 | 1527 | AVNTEGVYSEPRPIG | | | | X | Q6JC40 |
| 1146 | 1528 | DNNEGADGVGSSSGN | | | | X | Q6JC40 |
| 1147 | 1529 | DPQPIGEPPAAPSGV | | | | X | Q6JC40 |
| 1148 | 1530 | DRFFPLSGSLIFGKQ | | | | X | Q6JC40 |
| 1149 | 1531 | FGMKHPPPQILIKNT | | | | X | Q6JC40 |
| 1150 | 1532 | GLVLPGYKYLGPGNG | | | | X | Q6JC40 |
| 1151 | 1533 | GNLGRAVFQAKKRLL | | | | X | Q6JC40 |
| 1152 | 1534 | GPGNGLDKGEPVNAA | | | | X | Q6JC40 |
| 1153 | 1535 | GQTGDTESVPDPQPI | | | | X | Q6JC40 |
| 1154 | 1536 | GSSSGNWHCDSQWLG | | | | X | Q6JC40 |
| 1155 | 1537 | GWVQNQGILPGMVWQ | | | | X | Q6JC40 |
| 1156 | 1538 | IANNLTSTVQVFTDS | | | | X | Q6JC40 |
| 1157 | 1539 | KKRLLEPLGLVEEAA | | | | X | Q6JC40 |
| 1158 | 1540 | KKRLNFGQTGDTESV | | | | X | Q6JC40 |
| 1159 | 1541 | LEPLGLVEEAAKTAP | | | | X | Q6JC40 |
| 1160 | 1542 | LGLVEEAAKTAPGKK | | | | X | Q6JC40 |
| 1161 | 1543 | LKAGDNPYLKYNHAD | | | | X | Q6JC40 |
| 1162 | 1544 | LMGGFGMKHPPPQIL | | | | X | Q6JC40 |
| 1163 | 1545 | LNDGSQAVGRSSFYC | | | | X | Q6JC40 |
| 1164 | 1546 | LPYVLGSAHEGCLPP | | | | X | Q6JC40 |
| 1165 | 1547 | LSEGIREWWALKPGA | | | | X | Q6JC40 |
| 1166 | 1548 | MKHPPPQILIKNTPV | | | | X | Q6JC40 |
| 1167 | 1549 | NLSEGIREWWALKPG | | | | X | Q6JC40 |
| 1168 | 1550 | NSTSGGSSNDNAYFG | | | | X | Q6JC40 |
| 1169 | 1551 | NTEGVYSEPRPIGTR | | | | X | Q6JC40 |
| 1170 | 1552 | NYYKSNNVEFAVNTE | | | | X | Q6JC40 |
| 1171 | 1553 | PADPPTAFNKDKLNS | | | | X | Q6JC40 |
| 1172 | 1554 | PAKKRLNFGQTGDTE | | | | X | Q6JC40 |
| 1173 | 1555 | PLIDQYLYYLSKTIN | | | | X | Q6JC40 |
| 1174 | 1556 | PLMGGFGMKHPPPQI | | | | X | Q6JC40 |
| 1175 | 1557 | PQEPDSSAGIGKSGA | | | | X | Q6JC40 |
| 1176 | 1558 | PQPKANQQHQDNARG | | | | X | Q6JC40 |
| 1177 | 1559 | PSPLMGGFGMKHPPP | | | | X | Q6JC40 |
| 1178 | 1560 | PSQMLRTGNNFQFSY | | | | X | Q6JC40 |
| 1179 | 1561 | PSYRQQRVSTTVTQN | | | | X | Q6JC40 |
| 1180 | 1562 | QNQQTLKFSVAGPSN | | | | X | Q6JC40 |
| 1181 | 1563 | QTGWVQNQGILPGMV | | | | X | Q6JC40 |
| 1182 | 1564 | QYTSNYYKSNNVEFA | | | | X | Q6JC40 |
| 1183 | 1565 | RLMNPLIDQYLYYLS | | | | X | Q6JC40 |
| 1184 | 1566 | RLNFGQTGDTESVPD | | | | X | Q6JC40 |
| 1185 | 1567 | RNSLMNPGPAMASHK | | | | X | Q6JC40 |
| 1186 | 1568 | SAQAQAQTGWVQNQG | | | | X | Q6JC40 |
| 1187 | 1569 | SGNWHCDSQWLGDRV | | | | X | Q6JC40 |
| 1188 | 1570 | SHKEGEDRFFPLSGS | | | | X | Q6JC40 |
| 1189 | 1571 | SLMNPGPAMASHKEG | | | | X | Q6JC40 |
| 1190 | 1572 | SQMLRTGNNFQFSYE | | | | X | Q6JC40 |
| 1191 | 1573 | TDSDYQLPYVLGSAH | | | | X | Q6JC40 |
| 1192 | 1574 | TESYGQVATNHQSAQ | | | | X | Q6JC40 |
| 1193 | 1575 | TLKFSVAGPSNMAVQ | | | | X | Q6JC40 |
| 1194 | 1576 | TSNYYKSNNVEFAVN | | | | X | Q6JC40 |
| 1195 | 1577 | VFTDSDYQLPYVLGS | | | | X | Q6JC40 |
| 1196 | 1578 | VGSLTMASGGGAPVA | | | | X | Q6JC40 |
| 1197 | 1579 | VPADPPTAFNKDKLN | | | | X | Q6JC40 |
| 1198 | 1580 | WVQNQGILPGMVWQD | | | | X | Q6JC40 |
| 1199 | 1581 | WWALKPGAPQPKANQ | | | | X | Q6JC40 |
| 1200 | 1582 | YDQQLKAGDNPYLKY | | | | X | Q6JC40 |
| 1201 | 1583 | YKYLGPGNGLDKGEP | | | | X | Q6JC40 |
| 1202 | 1584 | YLGPGNGLDKGEPVN | | | | X | Q6JC40 |
| 1203 | 1585 | YRQQRVSTTVTQNNN | | | | X | Q6JC40 |
| 1204 | 1586 | YYKSNNVEFAVNTEG | | | | X | Q6JC40 |
| 1205 | 1587 | TDGNFHPSPLMGGFG | | | | X | Q6JC40 |
| 1206 | 1588 | WELQKENSKRWNPEI | | | | X | Q6JC40 |
| 1207 | 1589 | HTDGNFHPSPLMGGF | | | | X | Q6JC40 |
| 1208 | 1590 | PHTDGNFHPSPLMGG | | | | X | Q6JC40 |
| 1209 | 1591 | AKIPHTDGNFHPSPL | | | | X | Q6JC40 |
| 1210 | 1592 | QKENSKRWNPEIQYT | | | | X | Q6JC40 |
| 1211 | 1593 | GPIWAKIPHTDGNFH | | | | X | Q6JC40 |
| 1212 | 1594 | GVYSEPRPIGTRYLT | | | | X | Q6JC40 |
| 1213 | 1595 | KENSKRWNPEIQYTS | | | | X | Q6JC40 |
| 1214 | 1596 | KIPHTDGNFHPSPLM | | | | X | Q6JC40 |
| 1215 | 1597 | LQKENSKRWNPEIQY | | | | X | Q6JC40 |
| 1216 | 1598 | PIWAKIPHTDGNFHP | | | | X | Q6JC40 |
| 1217 | 1599 | TIQVFTDSEYQLPYV | | | | X | Q8JQF8 |
| 1218 | 1600 | NNLTSTIQVFTDSEY | | | | X | Q8JQF8 |
| 1219 | 1601 | HKDDEERFFPSNGIL | | | | X | Q8JQF8 |
| 1220 | 1602 | SSGNWHCDSTWLGDR | | | | X | Q8JQF8 |
| 1221 | 1603 | ATNDNTYFGYSTPWG | | | | X | Q8JQF8 |
| 1222 | 1604 | NFQFTYTFEDVPFHS | | | | X | Q8JQF8 |
| 1223 | 1605 | TAPGKKRPVEPSPQR | | | | X | Q8JQF8 |
| 1224 | 1606 | AALEHDKAYDQQLQA | | | | X | Q8JQF8 |
| 1225 | 1607 | ADYSDVMLTSEEEIK | | | | X | Q8JQF8 |
| 1226 | 1608 | ATHKDDEERFFPSNG | | | | X | Q8JQF8 |
| 1227 | 1609 | EPPAAPSGVGPNTMA | | | | X | Q8JQF8 |
| 1228 | 1610 | EWWALKPGAPKPKAN | | | | X | Q8JQF8 |
| 1229 | 1611 | FGKQNAARDNADYSD | | | | X | Q8JQF8 |
| 1230 | 1612 | MAAGGGAPMADNNEG | | | | X | Q8JQF8 |
| 1231 | 1613 | PQIGTVNSQGALPGM | | | | X | Q8JQF8 |
| 1232 | 1614 | QVFTDSEYQLPYVLG | | | | X | Q8JQF8 |
| 1233 | 1615 | VGSSSGNWHCDSTWL | | | | X | Q8JQF8 |
| 1234 | 1616 | ANNLTSTIQVFTDSE | | | | X | Q8JQF8 |
| 1235 | 1617 | GIAMATHKDDEERFF | | | | X | Q8JQF8 |
| 1236 | 1618 | GVGSSSGNWHCDSTW | | | | X | Q8JQF8 |
| 1237 | 1619 | IDQYLYYLSRTQTTG | | | | X | Q8JQF8 |
| 1238 | 1620 | IQVFTDSEYQLPYVL | | | | X | Q8JQF8 |
| 1239 | 1621 | RQQRVSTTTGQNNNS | | | | X | Q8JQF8 |
| 1240 | 1622 | TAPQIGTVNSQGALP | | | | X | Q8JQF8 |
| 1241 | 1623 | YDQQLQAGDNPYLRY | | | | X | Q8JQF8 |
| 1242 | 1624 | ATEEYGIVADNLQQQ | | | | X | Q8JQF8 |
| 1243 | 1625 | EGAKTAPGKKRPVEP | | | | X | Q8JQF8 |
| 1244 | 1626 | EVTQNEGTKTIANNL | | | | X | Q8JQF8 |
| 1245 | 1627 | FKLFNIQVKEVTQNE | | | | X | Q8JQF8 |
| 1246 | 1628 | FPSQMLRTGNNFQFT | | | | X | Q8JQF8 |
| 1247 | 1629 | GPNTMANQAKNWLPG | | | | X | Q8JQF8 |
| 1248 | 1630 | LEHDKAYDQQLQAGD | | | | X | Q8JQF8 |
| 1249 | 1631 | LIFGKQNAARDNADY | | | | X | Q8JQF8 |
| 1250 | 1632 | LTSTIQVFTDSEYQL | | | | X | Q8JQF8 |
| 1251 | 1633 | LYKQISNGTSGGATN | | | | X | Q8JQF8 |
| 1252 | 1634 | MANQAKNWLPGPCYR | | | | X | Q8JQF8 |
| 1253 | 1635 | NLTSTIQVFTDSEYQ | | | | X | Q8JQF8 |
| 1254 | 1636 | NPGIAMATHKDDEER | | | | X | Q8JQF8 |
| 1255 | 1637 | NQSKLNSFITQYSTG | | | | X | Q8JQF8 |
| 1256 | 1638 | PNTMAAGGGAPMADN | | | | X | Q8JQF8 |
| 1257 | 1639 | SFKLFNIQVKEVTQN | | | | X | Q8JQF8 |
| 1258 | 1640 | TDSEYQLPYVLGSAH | | | | X | Q8JQF8 |
| 1259 | 1641 | TMAAGGGAPMADNNE | | | | X | Q8JQF8 |
| 1260 | 1642 | AMATHKDDEERFFPS | | | | X | Q8JQF8 |
| 1261 | 1643 | APSGVGPNTMAAGGG | | | | X | Q8JQF8 |
| 1262 | 1644 | DPPTTFNQSKLNSFI | | | | X | Q8JQF8 |
| 1263 | 1645 | DPQPLGEPPAAPSGV | | | | X | Q8JQF8 |
| 1264 | 1646 | EGIREWWALKPGAPK | | | | X | Q8JQF8 |
| 1265 | 1647 | FPSNGILIFGKQNAA | | | | X | Q8JQF8 |
| 1266 | 1648 | FTDSEYQLPYVLGSA | | | | X | Q8JQF8 |
| 1267 | 1649 | GAKTAPGKKRPVEPS | | | | X | Q8JQF8 |
| 1268 | 1650 | GGTANTQTLGFSQGG | | | | X | Q8JQF8 |
| 1269 | 1651 | GILIFGKQNAARDNA | | | | X | Q8JQF8 |
| 1270 | 1652 | GTKTIANNLTSTIQV | | | | X | Q8JQF8 |
| 1271 | 1653 | INNNWGFRPKRLSFK | | | | X | Q8JQF8 |
| 1272 | 1654 | IQYTSNYYKSTSVDF | | | | X | Q8JQF8 |
| 1273 | 1655 | ISNGTSGGATNDNTY | | | | X | Q8JQF8 |
| 1274 | 1656 | KAYDQQLQAGDNPYL | | | | X | Q8JQF8 |
| 1275 | 1657 | KEVTQNEGTKTIANN | | | | X | Q8JQF8 |
| 1276 | 1658 | KLFNIQVKEVTQNEG | | | | X | Q8JQF8 |
| 1277 | 1659 | KSTSVDFAVNTEGVY | | | | X | Q8JQF8 |
| 1278 | 1660 | KTIANNLTSTIQVFT | | | | X | Q8JQF8 |
| 1279 | 1661 | KTTNPVATEEYGIVA | | | | X | Q8JQF8 |
| 1280 | 1662 | LMNPLIDQYLYYLSR | | | | X | Q8JQF8 |
| 1281 | 1663 | LPTYNNHLYKQISNG | | | | X | Q8JQF8 |
| 1282 | 1664 | LTSEEEIKTTNPVAT | | | | X | Q8JQF8 |
| 1283 | 1665 | MADNNEGADGVGSSS | | | | X | Q8JQF8 |
| 1284 | 1666 | NGTSGGATNDNTYFG | | | | X | Q8JQF8 |
| 1285 | 1667 | NHLYKQISNGTSGGA | | | | X | Q8JQF8 |
| 1286 | 1668 | NIQVKEVTQNEGTKT | | | | X | Q8JQF8 |
| 1287 | 1669 | NLQQQNTAPQIGTVN | | | | X | Q8JQF8 |
| 1288 | 1670 | NNHLYKQISNGTSGG | | | | X | Q8JQF8 |
| 1289 | 1671 | NTMANQAKNWLPGPC | | | | X | Q8JQF8 |
| 1290 | 1672 | PEIQYTSNYYKSTSV | | | | X | Q8JQF8 |
| 1291 | 1673 | PGKKRPVEPSPQRSP | | | | X | Q8JQF8 |
| 1292 | 1674 | PTYNNHLYKQISNGT | | | | X | Q8JQF8 |
| 1293 | 1675 | QGGPNTMANQAKNWL | | | | X | Q8JQF8 |
| 1294 | 1676 | QNEGTKTIANNLTST | | | | X | Q8JQF8 |
| 1295 | 1677 | QNNNSNFAWTAGTKY | | | | X | Q8JQF8 |
| 1296 | 1678 | QNTAPQIGTVNSQGA | | | | X | Q8JQF8 |
| 1297 | 1679 | QPLGEPPAAPSGVGP | | | | X | Q8JQF8 |
| 1298 | 1680 | QTLGFSQGGPNTMAN | | | | X | Q8JQF8 |
| 1299 | 1681 | QVKEVTQNEGTKTIA | | | | X | Q8JQF8 |
| 1300 | 1682 | SGVGPNTMAAGGGAP | | | | X | Q8JQF8 |
| 1301 | 1683 | SNFAWTAGTKYHLNG | | | | X | Q8JQF8 |
| 1302 | 1684 | SQGALPGMVWQNRDV | | | | X | Q8JQF8 |
| 1303 | 1685 | TQNEGTKTIANNLTS | | | | X | Q8JQF8 |
| 1304 | 1686 | TSGGATNDNTYFGYS | | | | X | Q8JQF8 |
| 1305 | 1687 | TSTIQVFTDSEYQLP | | | | X | Q8JQF8 |
| 1306 | 1688 | TYNNHLYKQISNGTS | | | | X | Q8JQF8 |
| 1307 | 1689 | VGPNTMAAGGGAPMA | | | | X | Q8JQF8 |
| 1308 | 1690 | VMLTSEEEIKTTNPV | | | | X | Q8JQF8 |
| 1309 | 1691 | WLPGPCYRQQRVSTT | | | | X | Q8JQF8 |
| 1310 | 1692 | YLSRTQTTGGTANTQ | | | | X | Q8JQF8 |
| 1311 | 1693 | YYKSTSVDFAVNTEG | | | | X | Q8JQF8 |
| 1312 | 1694 | DGNFHPSPLMGGFGL | | | | X | Q8JQF8 |
| 1313 | 1695 | NDNTYFGYSTPWGYF | | | | X | Q8JQF8 |
| 1314 | 1696 | GALPGMVWQNRDVYL | | | | X | Q8JQF8 |
| 1315 | 1697 | AGGGAPMADNNEGAD | | | | X | Q8JQF8 |
| 1316 | 1698 | RPVEPSPQRSPDSST | | | | X | Q8JQF8 |
| 1317 | 1699 | MVWQNRDVYLQGPIW | | | | X | Q8JQF8 |
| 1318 | 1700 | TNDNTYFGYSTPWGY | | | | X | Q8JQF8 |
| 1319 | 1701 | KRPVEPSPQRSPDSS | | | | X | Q8JQF8 |
| 1320 | 1702 | LPGMVWQNRDVYLQG | | | | X | Q8JQF8 |
| 1321 | 1703 | VPDPQPLGEPPAAPS | | | | X | Q8JQF8 |
| 1322 | 1704 | VWQNRDVYLQGPIWA | | | | X | Q8JQF8 |
| 1323 | 1705 | AAGGGAPMADNNEGA | | | | X | Q8JQF8 |
| 1324 | 1706 | DSSTGIGKKGQQPAR | | | | X | Q8JQF8 |
| 1325 | 1707 | GKKGQQPARKRLNFG | | | | X | Q8JQF8 |
| 1326 | 1708 | NFHPSPLMGGFGLKH | | | | X | Q8JQF8 |
| 1327 | 1709 | QGALPGMVWQNRDVY | | | | X | Q8JQF8 |
| 1328 | 1710 | QQPARKRLNFGQTGD | | | | X | Q8JQF8 |
| 1329 | 1711 | ALPGMVWQNRDVYLQ | | | | X | Q8JQF8 |
| 1330 | 1712 | GIGKKGQQPARKRLN | | | | X | Q8JQF8 |
| 1331 | 1713 | GMVWQNRDVYLQGPI | | | | X | Q8JQF8 |
| 1332 | 1714 | GNFHPSPLMGGFGLK | | | | X | Q8JQF8 |
| 1333 | 1715 | KKRPVEPSPQRSPDS | | | | X | Q8JQF8 |
| 1334 | 1716 | PDSSTGIGKKGQQPA | | | | X | Q8JQF8 |
| 1335 | 1717 | PGMVWQNRDVYLQGP | | | | X | Q8JQF8 |
| 1336 | 1718 | QRSPDSSTGIGKKGQ | | | | X | Q8JQF8 |
| 1337 | 1719 | VEPSPQRSPDSSTGI | | | | X | Q8JQF8 |
| 1338 | 1720 | QAKKRVLEPLGLVEE | | | | X | Q8JQF8 |
| 1339 | 1721 | EPLGLVEEGAKTAPG | | | | X | Q8JQF8 |
| 1340 | 1722 | RAVFQAKKRVLEPLG | | | | X | Q8JQF8 |
| 1341 | 1723 | AKKRVLEPLGLVEEG | | | | X | Q8JQF8 |
| 1342 | 1724 | FQAKKRVLEPLGLVE | | | | X | Q8JQF8 |
| 1343 | 1725 | PLGLVEEGAKTAPGK | | | | X | Q8JQF8 |
| 1344 | 1726 | RVLEPLGLVEEGAKT | | | | X | Q8JQF8 |
| 1345 | 1727 | GYSTPWGYFDFNRFH | | | | X | Q9YIJ1 |
| 1346 | 1728 | FEFTYNFEEVPFHSS | | | | X | Q9YIJ1 |
| 1347 | 1729 | NPTERSSFFCLEYFP | | | | X | Q9YIJ1 |
| 1348 | 1730 | GDWHCDSTWMGDRVV | | | | X | Q9YIJ1 |
| 1349 | 1731 | TVQVFTDDDYQLPYV | | | | X | Q9YIJ1 |
| 1350 | 1732 | FTYNFEEVPFHSSFA | | | | X | Q9YIJ1 |
| 1351 | 1733 | VDHPPDWLEEVGEGL | | | | X | Q9YIJ1 |
| 1352 | 1734 | RSSFFCLEYFPSKML | | | | X | Q9YIJ1 |
| 1353 | 1735 | TGAHFHPSPAMGGFG | | | | X | Q9YIJ1 |
| 1354 | 1736 | ASGDWHCDSTWMGDR | | | | X | Q9YIJ1 |
| 1355 | 1737 | GVGNASGDWHCDSTW | | | | X | Q9YIJ1 |
| 1356 | 1738 | PQFVDFAPDSTGEYR | | | | X | Q9YIJ1 |
| 1357 | 1739 | RGEPVNRADEVAREH | | | | X | Q9YIJ1 |
| 1358 | 1740 | AYFGYSTPWGYFDFN | | | | X | Q9YIJ1 |
| 1359 | 1741 | DNTENPTERSSFFCL | | | | X | Q9YIJ1 |
| 1360 | 1742 | DYQLPYVVGNGTEGC | | | | X | Q9YIJ1 |
| 1361 | 1743 | PETGAHFHPSPAMGG | | | | X | Q9YIJ1 |
| 1362 | 1744 | RADEVAREHDISYNE | | | | X | Q9YIJ1 |
| 1363 | 1745 | TERSSFFCLEYFPSK | | | | X | Q9YIJ1 |
| 1364 | 1746 | EGLREFLGLEAGPPK | | | | X | Q9YIJ1 |
| 1365 | 1747 | NDPQFVDFAPDSTGE | | | | X | Q9YIJ1 |
| 1366 | 1748 | PAMGGFGLKHPPPMM | | | | X | Q9YIJ1 |
| 1367 | 1749 | VAREHDISYNEQLEA | | | | X | Q9YIJ1 |
| 1368 | 1750 | VNRADEVAREHDISY | | | | X | Q9YIJ1 |
| 1369 | 1751 | YNHADAEFQEKLADD | | | | X | Q9YIJ1 |
| 1370 | 1752 | EPFGLVEEGAKTAPT | | | | X | Q9YIJ1 |
| 1371 | 1753 | FSDVPVSSFITQYST | | | | X | Q9YIJ1 |
| 1372 | 1754 | FTDDDYQLPYVVGNG | | | | X | Q9YIJ1 |
| 1373 | 1755 | HADAEFQEKLADDTS | | | | X | Q9YIJ1 |
| 1374 | 1756 | MGGFGLKHPPPMMLI | | | | X | Q9YIJ1 |
| 1375 | 1757 | NGLDRGEPVNRADEV | | | | X | Q9YIJ1 |
| 1376 | 1758 | NPEIQYTNNYNDPQF | | | | X | Q9YIJ1 |
| 1377 | 1759 | QVFTDDDYQLPYVVG | | | | X | Q9YIJ1 |
| 1378 | 1760 | REHDISYNEQLEAGD | | | | X | Q9YIJ1 |
| 1379 | 1761 | VGEGLREFLGLEAGP | | | | X | Q9YIJ1 |
| 1380 | 1762 | WGYFDFNRFHSHWSP | | | | X | Q9YIJ1 |
| 1381 | 1763 | WSPRDWQRLINNYWG | | | | X | Q9YIJ1 |
| 1382 | 1764 | YFDFNRFHSHWSPRD | | | | X | Q9YIJ1 |
| 1383 | 1765 | ADGVGNASGDWHCDS | | | | X | Q9YIJ1 |
| 1384 | 1766 | ARTEEDSKPSTSSDA | | | | X | Q9YIJ1 |
| 1385 | 1767 | ASVSAFATTNRMELE | | | | X | Q9YIJ1 |
| 1386 | 1768 | DFNRFHSHWSPRDWQ | | | | X | Q9YIJ1 |
| 1387 | 1769 | EGCLPAFPPQVFTLP | | | | X | Q9YIJ1 |
| 1388 | 1770 | ETQPVNRVAYNVGGQ | | | | X | Q9YIJ1 |
| 1389 | 1771 | FHPSPAMGGFGLKHP | | | | X | Q9YIJ1 |
| 1390 | 1772 | GGGGPLGDNNQGADG | | | | X | Q9YIJ1 |
| 1391 | 1773 | GGPLGDNNQGADGVG | | | | X | Q9YIJ1 |
| 1392 | 1774 | IDDHFPKRKKARTEE | | | | X | Q9YIJ1 |
| 1393 | 1775 | LVEEGAKTAPTGKRI | | | | X | Q9YIJ1 |
| 1394 | 1776 | NLQEIVPGSVWMERD | | | | X | Q9YIJ1 |
| 1395 | 1777 | NPYLKYNHADAEFQE | | | | X | Q9YIJ1 |
| 1396 | 1778 | PAFPPQVFTLPQYGY | | | | X | Q9YIJ1 |
| 1397 | 1779 | PASSLGADTMSAGGG | | | | X | Q9YIJ1 |
| 1398 | 1780 | PVSSFITQYSTGQVT | | | | X | Q9YIJ1 |
| 1399 | 1781 | QGADGVGNASGDWHC | | | | X | Q9YIJ1 |
| 1400 | 1782 | TGGVQFNKNLAGRYA | | | | X | Q9YIJ1 |
| 1401 | 1783 | VSAFATTNRMELEGA | | | | X | Q9YIJ1 |
| 1402 | 1784 | YFPSKMLRTGNNFEF | | | | X | Q9YIJ1 |
| 1403 | 1785 | YNFEEVPFHSSFAPS | | | | X | Q9YIJ1 |
| 1404 | 1786 | AFATTNRMELEGASY | | | | X | Q9YIJ1 |
| 1405 | 1787 | AHFHPSPAMGGFGLK | | | | X | Q9YIJ1 |
| 1406 | 1788 | DFAPDSTGEYRTTRP | | | | X | Q9YIJ1 |
| 1407 | 1789 | DGSNANAYFGYSTPW | | | | X | Q9YIJ1 |
| 1408 | 1790 | DNPYLKYNHADAEFQ | | | | X | Q9YIJ1 |
| 1409 | 1791 | DSTGEYRTTRPIGTR | | | | X | Q9YIJ1 |
| 1410 | 1792 | EGNMLITSESETQPV | | | | X | Q9YIJ1 |
| 1411 | 1793 | FVSTNNTGGVQFNKN | | | | X | Q9YIJ1 |
| 1412 | 1794 | GDNPYLKYNHADAEF | | | | X | Q9YIJ1 |
| 1413 | 1795 | GGNLGKAVFQAKKRV | | | | X | Q9YIJ1 |
| 1414 | 1796 | GTEGCLPAFPPQVFT | | | | X | Q9YIJ1 |
| 1415 | 1797 | HDISYNEQLEAGDNP | | | | X | Q9YIJ1 |
| 1416 | 1798 | IVPGSVWMERDVYLQ | | | | X | Q9YIJ1 |
| 1417 | 1799 | KIPETGAHFHPSPAM | | | | X | Q9YIJ1 |
| 1418 | 1800 | KMLRTGNNFEFTYNF | | | | X | Q9YIJ1 |
| 1419 | 1801 | LEAGPPKPKPNQQHQ | | | | X | Q9YIJ1 |
| 1420 | 1802 | LEYFPSKMLRTGNNF | | | | X | Q9YIJ1 |
| 1421 | 1803 | LGPGNGLDRGEPVNR | | | | X | Q9YIJ1 |
| 1422 | 1804 | LPGYNYLGPGNGLDR | | | | X | Q9YIJ1 |
| 1423 | 1805 | LVDQYLYRFVSTNNT | | | | X | Q9YIJ1 |
| 1424 | 1806 | NIQVKEVTVQDSTTT | | | | X | Q9YIJ1 |
| 1425 | 1807 | NITSFSDVPVSSFIT | | | | X | Q9YIJ1 |
| 1426 | 1808 | NNQGADGVGNASGDW | | | | X | Q9YIJ1 |
| 1427 | 1809 | NRASVSAFATTNRME | | | | X | Q9YIJ1 |
| 1428 | 1810 | NTPVPGNITSFSDVP | | | | X | Q9YIJ1 |
| 1429 | 1811 | NYLGPGNGLDRGEPV | | | | X | Q9YIJ1 |
| 1430 | 1812 | PATGTYNLQEIVPGS | | | | X | Q9YIJ1 |
| 1431 | 1813 | PGNGLDRGEPVNRAD | | | | X | Q9YIJ1 |
| 1432 | 1814 | PGNITSFSDVPVSSF | | | | X | Q9YIJ1 |
| 1433 | 1815 | PRDWQRLINNYWGFR | | | | X | Q9YIJ1 |
| 1434 | 1816 | PSPAMGGFGLKHPPP | | | | X | Q9YIJ1 |
| 1435 | 1817 | PYVVGNGTEGCLPAF | | | | X | Q9YIJ1 |
| 1436 | 1818 | QARGLVLPGYNYLGP | | | | X | Q9YIJ1 |
| 1437 | 1819 | QEKLADDTSFGGNLG | | | | X | Q9YIJ1 |
| 1438 | 1820 | QLPYVVGNGTEGCLP | | | | X | Q9YIJ1 |
| 1439 | 1821 | RMELEGASYQVPPQP | | | | X | Q9YIJ1 |
| 1440 | 1822 | SVWMERDVYLQGPIW | | | | X | Q9YIJ1 |
| 1441 | 1823 | TGEYRTTRPIGTRYL | | | | X | Q9YIJ1 |
| 1442 | 1824 | TTTIANNLTSTVQVF | | | | X | Q9YIJ1 |
| 1443 | 1825 | VVGNGTEGCLPAFPP | | | | X | Q9YIJ1 |
| 1444 | 1826 | WMERDVYLQGPIWAK | | | | X | Q9YIJ1 |
| 1445 | 1827 | WMGDRVVTKSTRTWV | | | | X | Q9YIJ1 |
| 1446 | 1828 | YLYRFVSTNNTGGVQ | | | | X | Q9YIJ1 |
| 1447 | 1829 | ADDTSFGGNLGKAVF | | | | X | Q9YIJ1 |
| 1448 | 1830 | AKKRVLEPFGLVEEG | | | | X | Q9YIJ1 |
| 1449 | 1831 | ALENTMIFNSQPANP | | | | X | Q9YIJ1 |
| 1450 | 1832 | APDSTGEYRTTRPIG | | | | X | Q9YIJ1 |
| 1451 | 1833 | APSQNLFKLANPLVD | | | | X | Q9YIJ1 |
| 1452 | 1834 | APTGKRIDDHFPKRK | | | | X | Q9YIJ1 |
| 1453 | 1835 | ASYQVPPQPNGMTNN | | | | X | Q9YIJ1 |
| 1454 | 1836 | ATNNQSSTTAPATGT | | | | X | Q9YIJ1 |
| 1455 | 1837 | DHFPKRKKARTEEDS | | | | X | Q9YIJ1 |
| 1456 | 1838 | DTSFGGNLGKAVFQA | | | | X | Q9YIJ1 |
| 1457 | 1839 | DVPVSSFITQYSTGQ | | | | X | Q9YIJ1 |
| 1458 | 1840 | DWQRLINNYWGFRPR | | | | X | Q9YIJ1 |
| 1459 | 1841 | FPPQVFTLPQYGYAT | | | | X | Q9YIJ1 |
| 1460 | 1842 | FQAKKRVLEPFGLVE | | | | X | Q9YIJ1 |
| 1461 | 1843 | GDNNQGADGVGNASG | | | | X | Q9YIJ1 |
| 1462 | 1844 | GDRVVTKSTRTWVLP | | | | X | Q9YIJ1 |
| 1463 | 1845 | GFRPRSLRVKIFNIQ | | | | X | Q9YIJ1 |
| 1464 | 1846 | GGQMATNNQSSTTAP | | | | X | Q9YIJ1 |
| 1465 | 1847 | GSGVNRASVSAFATT | | | | X | Q9YIJ1 |
| 1466 | 1848 | GSQQLQIPAQPASSL | | | | X | Q9YIJ1 |
| 1467 | 1849 | GVNRASVSAFATTNR | | | | X | Q9YIJ1 |
| 1468 | 1850 | IKSGSVDGSNANAYF | | | | X | Q9YIJ1 |
| 1469 | 1851 | KEVTVQDSTTTIANN | | | | X | Q9YIJ1 |
| 1470 | 1852 | KKENSKRWNPEIQYT | | | | X | Q9YIJ1 |
| 1471 | 1853 | LDRGEPVNRADEVAR | | | | X | Q9YIJ1 |
| 1472 | 1854 | LGADTMSAGGGGPLG | | | | X | Q9YIJ1 |
| 1473 | 1855 | LINNYWGFRPRSLRV | | | | X | Q9YIJ1 |
| 1474 | 1856 | LREFLGLEAGPPKPK | | | | X | Q9YIJ1 |
| 1475 | 1857 | LVLPGYNYLGPGNGL | | | | X | Q9YIJ1 |
| 1476 | 1858 | NLAGRYANTYKNWFP | | | | X | Q9YIJ1 |
| 1477 | 1859 | NLFKLANPLVDQYLY | | | | X | Q9YIJ1 |
| 1478 | 1860 | NNQSSTTAPATGTYN | | | | X | Q9YIJ1 |
| 1479 | 1861 | NNTGGVQFNKNLAGR | | | | X | Q9YIJ1 |
| 1480 | 1862 | NPLVDQYLYRFVSTN | | | | X | Q9YIJ1 |
| 1481 | 1863 | NRDNTENPTERSSFF | | | | X | Q9YIJ1 |
| 1482 | 1864 | PFHSSFAPSQNLFKL | | | | X | Q9YIJ1 |
| 1483 | 1865 | PIWAKIPETGAHFHP | | | | X | Q9YIJ1 |
| 1484 | 1866 | PLGDNNQGADGVGNA | | | | X | Q9YIJ1 |
| 1485 | 1867 | PMGRTQGWNLGSGVN | | | | X | Q9YIJ1 |
| 1486 | 1868 | PMMLIKNTPVPGNIT | | | | X | Q9YIJ1 |
| 1487 | 1869 | PQPNGMTNNLQGSNT | | | | X | Q9YIJ1 |
| 1488 | 1870 | QGPIWAKIPETGAHF | | | | X | Q9YIJ1 |
| 1489 | 1871 | QGSNTYALENTMIFN | | | | X | Q9YIJ1 |
| 1490 | 1872 | QPVNRVAYNVGGQMA | | | | X | Q9YIJ1 |
| 1491 | 1873 | QVKEVTVQDSTTTIA | | | | X | Q9YIJ1 |
| 1492 | 1874 | REIKSGSVDGSNANA | | | | X | Q9YIJ1 |
| 1493 | 1875 | RTTRPIGTRYLTRPL | | | | X | Q9YIJ1 |
| 1494 | 1876 | RWNPEIQYTNNYNDP | | | | X | Q9YIJ1 |
| 1495 | 1877 | RYANTYKNWFPGPMG | | | | X | Q9YIJ1 |
| 1496 | 1878 | SFFCLEYFPSKMLRT | | | | X | Q9YIJ1 |
| 1497 | 1879 | SFGGNLGKAVFQAKK | | | | X | Q9YIJ1 |
| 1498 | 1880 | SNANAYFGYSTPWGY | | | | X | Q9YIJ1 |
| 1499 | 1881 | SNTYALENTMIFNSQ | | | | X | Q9YIJ1 |
| 1500 | 1882 | SQNLFKLANPLVDQY | | | | X | Q9YIJ1 |
| 1501 | 1883 | SVDGSNANAYFGYST | | | | X | Q9YIJ1 |
| 1502 | 1884 | TGTYNLQEIVPGSVW | | | | X | Q9YIJ1 |
| 1503 | 1885 | TLNRDNTENPTERSS | | | | X | Q9YIJ1 |
| 1504 | 1886 | TSESETQPVNRVAYN | | | | X | Q9YIJ1 |
| 1505 | 1887 | TYKNWFPGPMGRTQG | | | | X | Q9YIJ1 |
| 1506 | 1888 | YATLNRDNTENPTER | | | | X | Q9YIJ1 |
| 1507 | 1889 | YGYATLNRDNTENPT | | | | X | Q9YIJ1 |
| 1508 | 1890 | YRFVSTNNTGGVQFN | | | | X | Q9YIJ1 |
| 1509 | 1891 | YSTPWGYFDFNRFHS | | | | X | Q9YIJ1 |

### Example 12: Screen for Anti-AAV Antibodies in Human Sera Based on Cyclic Peptides

[0406] More than 1200 cyclic peptides derived from the sequences of human and rhesus monkey AAV sequences and artificial AAV sequences according to Table 2 and with a sequence length of 14 amino-acids each were synthesized.

[0407] Samples obtained from human donors were screened for antibodies against these AAV-derived peptides immobilized on microarrays. To this end, IgG was prepared from blood obtained from the human donors by protein G purification. Each IgG sample was incubated with the peptide microarrays and Ig binding signals were detected by fluorescence. All antibody binding signals to the peptides on the arrays were background subtracted and ranked for each sample and a deduplicated aggregate of the respective top 250 peptide hits for each donor with the corresponding protein sequence of origin (as obtained from UniProt or other sources) was compiled (designated as group II). Further, the deduplicated aggregate of the respective top 50 peptide hits for each donor was compiled and designated as group I.

[0408] Detailed results are shown in Table 2 below. Altogether, group I contains 47 distinct peptide hits (assigned to the corresponding AAV vectors in Table 2) and group II yielded 172 distinct peptide hits. Evidently, group I is a subset of group II.

[0409] Thus, all listed peptides, preferably peptides belonging to group I, provide sequences from which shorter peptide sequences can be derived for antibody depletion according to the present invention. Furthermore, also other peptide sequences (or fragments) from the proteins from which the peptides of Table 2 were derived (preferably from group I), are suited to be used for SADCs according to the present invention. In addition, these peptides can also be used as probes for the diagnostic detection of anti-AAV antibodies in biological samples such as human sera.

TABLE 2
This table lists the detailed results of a screen for
circularized peptides as a basis for the construction of anti-AAV
antibody depleting SADCs according to the present invention. These
peptides are also suitable for typing neutralizing antibodies
directed against AAV vectors. If not stated otherwise, the peptides
represent fragments from different AAV VP1 proteins. Source given
is either UniProt ID, GenBank ID, PDB ID or AAV strain name.

| peptide | SEQ | | group | group | |
|---|---|---|---|---|---|
| # | ID NO | peptide | I | II | source |
| 1 | 1892 | DSQWLGDRVITTST | X | X | AAVLK03.L125I |
| 2 | 1893 | DTNGVYSEPRPIGT | X | X | AAVLK03.L125I |
| 3 | 1894 | STNLQRGNLALGET | X | X | AOD99651.1 |
| 4 | 1895 | ANNLTSTVQIFADS | X | X | A9RAI0 |
| 5 | 1896 | KIFNIQVKEVTTSN | X | X | A9RAI0 |
| 6 | 1897 | GNTSQQQTDRNAFY | X | X | O41855 |
| 7 | 1898 | LEDNLSEGIREWWD | X | X | AAO88201.1 |
| 8 | 1899 | SESVPDPQPIGEPP | X | X | AAO88201.1 |
| 9 | 1900 | LIKNTPVPADPPTT | X | X | AAO88201.1 |
| 10 | 1901 | PQYGYLTLNNGSQA | X | X | AAO88201.1 |
| 11 | 1902 | DEEEIRTTNPVATE | X | X | AAVLK03.L125I |
| 12 | 1903 | NYNKSVNVDFTVDT | X | X | AAVLK03.L125I |
| 13 | 1904 | YHLNGRDSLVNPGP | X | X | AAVLK03.L125I |
| 14 | 1905 | TRPATAPQIGTVNS | X | X | AOD99652.1 |
| 15 | 1906 | GETTRPATAAQTQV | X | X | AOD99656.1 |
| 16 | 1907 | IFNIQVKEVTTSNG | X | X | A9RAI0 |
| 17 | 1908 | SNSQLIFAGPNPSG | X | X | A9RAI0 |
| 18 | 1909 | TTTSSNNLLFTSEE | X | X | A9RAI0 |
| 19 | 1910 | FNIQVKEVTTNDGV | X | X | O56137 |
| 20 | 1911 | GQTGDSESVPDPQP | X | X | AAO88201.1 |
| 21 | 1912 | PQILIKNTPVPADP | X | X | AAO88201.1 |
| 22 | 1913 | QLKAGDNPYLRYNH | X | X | AAO88201.1 |
| 23 | 1914 | SFITQYSTGQVSVE | X | X | AAO88201.1 |
| 24 | 1915 | FGKQGAGRDNVDYS | X | X | AAS99285.1 |
| 25 | 1916 | YYKSTNVDFAVNTE | X | X | AAS99285.1 |
| 26 | 1917 | HYFGYSTPWGYFDF | X | X | AAVLK03.L125I |
| 27 | 1918 | APGKKRPVDQSPQE | X | X | AAVLK03.L125I |
| 28 | 1919 | GKKRPVDQSPQEPD | X | X | AAVLK03.L125I |
| 29 | 1920 | KTAPGKKRPVDQSP | X | X | AAVLK03.L125I |
| 30 | 1921 | PEIQYTSNYNKSVN | X | X | AAVLK03.L125I |
| 31 | 1922 | SESVPDPQPLGEPP | X | X | AAVLK03.L125I |
| 32 | 1923 | TAPGKKRPVDQSPQ | X | X | AAVLK03.L125I |
| 33 | 1924 | YDQQLKAGDNPYLK | X | X | AAVLK03.L125I |
| 34 | 1925 | YLYYLNRTQGTTSG | X | X | AAVLK03.L125I |
| 35 | 1926 | DKAYDRQLDSGDNP | X | X | AAV2i8 |
| 36 | 1927 | GTNTMATGSGAPMA | X | X | AAV2i8 |
| 37 | 1928 | DKAYDQQLQAGDNP | X | X | AAV-Rh74 |
| 38 | 1929 | TESVPDPQPIGEPP | X | X | ALU85156.1 |
| 39 | 1930 | KNTPVPADPPTTES | X | X | AAO88201.1 |
| 40 | 1931 | PVPADPPTTESQAK | X | X | AAO88201.1 |
| 41 | 1932 | DEEEIKATNPVATE | X | X | O56137 |
| 42 | 1933 | DKDKFFPMSGVMIF | X | X | O56137 |
| 43 | 1934 | LQQQNTAPQIGTVN | X | X | Q8JQF8 |
| 44 | 1935 | EEEIKTTNPVATEE | X | X | Q8JQF8 |
| 45 | 1936 | GQNNNSNFAWTAGT | X | X | Q8JQF8 |
| 46 | 1937 | DDEDKFFPMSGVMI | X | X | Q9WBP8 |
| 47 | 1938 | PLVDQYLYRFVSTN | X | X | Q9YIJ1 |
| 48 | 1939 | ADPPTTFSQAKLAS | | X | AAO88201.1 |
| 49 | 1940 | DAAALEHDKAYDQQ | | X | AAO88201.1 |
| 50 | 1941 | DKAYDQQLKAGDNP | | X | AAO88201.1 |
| 51 | 1942 | DSESVPDPQPIGEP | | X | AAO88201.1 |
| 52 | 1943 | DWLEDNLSEGIREW | | X | AAO88201.1 |
| 53 | 1944 | EDNLSEGIREWWDL | | X | AAO88201.1 |
| 54 | 1945 | EEIKTTNPVATEQY | | X | AAO88201.1 |
| 55 | 1946 | ENSKRWNPEIQYTS | | X | AAO88201.1 |
| 56 | 1947 | ESVPDPQPIGEPPA | | X | AAO88201.1 |
| 57 | 1948 | EYQLPYVLGSAHQG | | X | AAO88201.1 |
| 58 | 1949 | FQERLQEDTSFGGN | | X | AAO88201.1 |
| 59 | 1950 | GDSESVPDPQPIGE | | X | AAO88201.1 |
| 60 | 1951 | HSQSLDRLMNPLID | | X | AAO88201.1 |
| 61 | 1952 | KGEPVNAADAAALE | | X | AAO88201.1 |
| 62 | 1953 | KNTPVPADPPTTFS | | X | AAO88201.1 |
| 63 | 1954 | LPYVLGSAHQGCLP | | X | AAO88201.1 |
| 64 | 1955 | LQQQNAAPIVGAVN | | X | AAO88201.1 |
| 65 | 1956 | NAADAAALEHDKAY | | X | AAO88201.1 |
| 66 | 1957 | NPGVAMATHKDDEE | | X | AAO88201.1 |
| 67 | 1958 | PGAPKPKANQQKQD | | X | AAO88201.1 |
| 68 | 1959 | PPQILIKNTPVPAD | | X | AAO88201.1 |
| 69 | 1960 | PRDWQRLINNNWGF | | X | AAO88201.1 |
| 70 | 1961 | PWGYFDFNRFHCHF | | X | AAO88201.1 |
| 71 | 1962 | QLPYVLGSAHQGCL | | X | AAO88201.1 |
| 72 | 1963 | QQRVSTTLSQNNNS | | X | AAO88201.1 |
| 73 | 1964 | SEPRPIGTRYLTRN | | X | AAO88201.1 |
| 74 | 1965 | SGGSTNDNTYFGYS | | X | AAO88201.1 |
| 75 | 1966 | SQSLDRLMNPLIDQ | | X | AAO88201.1 |
| 76 | 1967 | TGDSESVPDPQPIG | | X | AAO88201.1 |
| 77 | 1968 | TIANNLTSTIQVFT | | X | AAO88201.1 |
| 78 | 1969 | TQYSTGQVSVEIEW | | X | AAO88201.1 |
| 79 | 1970 | VTQNEGTKTIANNL | | X | AAO88201.1 |
| 80 | 1971 | WLEDNLSEGIREWW | | X | AAO88201.1 |
| 81 | 1972 | YFGYSTPWGYFDFN | | X | AAO88201.1 |
| 82 | 1973 | LSRTQSTGGTQGTQ | | X | AAS99285.1 |
| 83 | 1974 | TQGTQQLLFSQAGP | | X | AAS99285.1 |
| 84 | 1975 | DAEFQERLKEDTSF | | X | AAVLK03.L125I |
| 85 | 1976 | DDEEKFFPMHGNLI | | X | AAVLK03.L125I |
| 86 | 1977 | DGHFHPSPLMGGFG | | X | AAVLK03.L125I |
| 87 | 1978 | DSESVPDPQPLGEP | | X | AAVLK03.L125I |
| 88 | 1979 | EEEIRTTNPVATEQ | | X | AAVLK03.L125I |
| 89 | 1980 | EEIRTTNPVATEQY | | X | AAVLK03.L125I |
| 90 | 1981 | FQERLKEDTSFGGN | | X | AAVLK03.L125I |
| 91 | 1982 | GADGVGNSSGNWHC | | X | AAVLK03.L125I |
| 92 | 1983 | GDSESVPDPQPLGE | | X | AAVLK03.L125I |
| 93 | 1984 | GNGLDKGEPVNAAD | | X | AAVLK03.L125I |
| 94 | 1985 | KKRPVDQSPQEPDS | | X | AAVLK03.L125I |
| 95 | 1986 | KRPVDQSPQEPDSS | | X | AAVLK03.L125I |
| 96 | 1987 | KSVNVDFTVDTNGV | | X | AAVLK03.L125I |
| 97 | 1988 | LSKTANDNNNSNFP | | X | AAVLK03.L125I |
| 98 | 1989 | MASHKDDEEKFFPM | | X | AAVLK03.L125I |
| 99 | 1990 | NNFQFSYTFEDVPF | | X | AAVLK03.L125I |
| 100 | 1991 | PVDQSPQEPDSSSG | | X | AAVLK03.L125I |
| 101 | 1992 | PVPANPPTTFSPAK | | X | AAVLK03.L125I |
| 102 | 1993 | QQRLSKTANDNNNS | | X | AAVLK03.L125I |
| 103 | 1994 | QSSNTAPTTRTVND | | X | AAVLK03.L125I |
| 104 | 1995 | SKTANDNNNSNFPW | | X | AAVLK03.L125I |
| 105 | 1996 | SNYNKSVNVDFTVD | | X | AAVLK03.L125I |
| 106 | 1997 | TTSGTTNQSRLLFS | | X | AAVLK03.L125I |
| 107 | 1998 | VMITDEEEIRTTNP | | X | AAVLK03.L125I |
| 108 | 1999 | APGKKRPVEHSPVE | | X | AAV2i8 |
| 109 | 2000 | FFPQSGVLIFGKQG | | X | AAV2i8 |
| 110 | 2001 | FGKQGSEKTNVDIE | | X | AAV2i8 |
| 111 | 2002 | HKDDEEKFFPQSGV | | X | AAV2i8 |
| 112 | 2003 | KGEPVNEADAAALE | | X | AAV2i8 |
| 113 | 2004 | NEADAAALEHDKAY | | X | AAV2i8 |
| 114 | 2005 | NPVATEQYGSVSTN | | X | AAV2i8 |
| 115 | 2006 | PQILIKNTPVPANP | | X | AAV2i8 |
| 116 | 2007 | QQRVSKTSADNNNS | | X | AAV2i8 |
| 117 | 2008 | QTGDADSVPDPQPL | | X | AAV2i8 |
| 118 | 2009 | ADPPTTFNQAKLAS | | X | AAV-Rh74 |
| 119 | 2010 | AGDNVDYSSVMLTS | | X | AAV-Rh74 |
| 120 | 2011 | KNTPVPADPPTTFN | | X | AAV-Rh74 |
| 121 | 2012 | KRVLEPLGLVESPV | | X | AAV-Rh74 |
| 122 | 2013 | PYLRYHADAEFQER | | X | AAV-Rh74 |
| 123 | 2014 | EEEIKTTNPVATES | | X | ALU85156.1 |
| 124 | 2015 | EFAWPGASSWALNG | | X | ALU85156.1 |
| 125 | 2016 | KSNNVEFAVNTEGV | | X | ALU85156.1 |
| 126 | 2017 | MNPGPAMASHKEGE | | X | ALU85156.1 |
| 127 | 2018 | PVPADPPTAFNKDK | | X | ALU85156.1 |
| 128 | 2019 | TVQVFTDSDYQLPY | | X | ALU85156.1 |
| 129 | 2020 | NLQAANLALGETTR | | X | AOD99656.1 |
| 130 | 2021 | GGQMATNNQSLALG | | X | AOD99659.1 |
| 131 | 2022 | MATNNQSLALGETT | | X | AOD99659.1 |
| 132 | 2023 | KKRILEPLGLVEEA | | X | AAB95452.1 |
| 133 | 2024 | ADPPTTFNQSKLNS | | X | 3J1Q |
| 134 | 2025 | KSTSVDFAVNTEGV | | X | 3J1Q |
| 135 | 2026 | LQRGNRQAATADVN | | X | 3J1Q |
| 136 | 2027 | PVPADPPTTFNQSK | | X | 3J1Q |
| 137 | 2028 | DDDDRFFPMHGNLI | | X | QLI60567.1 |
| 138 | 2029 | PEPADVFMIPQYGY | | X | AAO88201.1 |
| 139 | 2030 | DIYYQGPIWAKVPH | | X | A9RAI0 |
| 140 | 2031 | FEKVPFHSMYAHSQ | | X | A9RAI0 |
| 141 | 2032 | FSAARINSFLTQYS | | X | A9RAI0 |
| 142 | 2033 | HSQSLDRMMNPLLD | | X | A9RAI0 |
| 143 | 2034 | KKRILEPLGLVEEG | | X | A9RAI0 |
| 144 | 2035 | MVPQYGYCGVVTGK | | X | A9RAI0 |
| 145 | 2036 | NQTDRNAFYCLEYF | | X | A9RAI0 |
| 146 | 2037 | RDTDMFGQIADNNQ | | X | A9RAI0 |
| 147 | 2038 | RDWQRLINNNWGLR | | X | A9RAI0 |
| 148 | 2039 | TVQIFADSTYELPY | | X | A9RAI0 |
| 149 | 2040 | DIYYQGPIWAKIPH | | X | O41855 |
| 150 | 2041 | QIFADSSYELPYVM | | X | O41855 |
| 151 | 2042 | THSTLDGRWSALTP | | X | O41855 |
| 152 | 2043 | TVQIFADSSYELPY | | X | O41855 |
| 153 | 2044 | DKFFPMSGVMIFGK | | X | O56137 |
| 154 | 2045 | EEEIKATNPVATER | | X | O56137 |
| 155 | 2046 | EGADGVGNASGNWH | | X | O56137 |
| 156 | 2047 | LFNIQVKEVTTNDG | | X | O56137 |
| 157 | 2048 | QVKEVTTNDGVTTI | | X | O56137 |
| 158 | 2049 | RVSKTKTDNNNSNF | | X | O56137 |
| 159 | 2050 | SDSEYQLPYVLGSA | | X | O56137 |
| 160 | 2051 | HSQSLDRLMNPLLD | | X | Q5Y9B2 |
| 161 | 2052 | IEMRAAPGGNAVDA | | X | Q5Y9B2 |
| 162 | 2053 | KRLNFEEDTGAGDG | | X | Q5Y9B2 |
| 163 | 2054 | SQSLDRLMNPLLDQ | | X | Q5Y9B2 |
| 164 | 2055 | STGQVAVQIEWEIE | | X | Q5Y9B2 |
| 165 | 2056 | TTSANNLLFTSEEE | | X | Q5Y9B2 |
| 166 | 2057 | TTSGETLNQGNAAT | | X | Q5Y9B2 |
| 167 | 2058 | GESESVPDPQPIGE | | X | Q5Y9B4 |
| 168 | 2059 | GQTGESESVPDPQP | | X | Q5Y9B4 |
| 169 | 2060 | ANPGIAMATHKDDE | | X | Q8JQF8 |
| 170 | 2061 | EGASYQVPPQPNGM | | X | Q9YIJ1 |
| 171 | 2062 | EYRTTRPIGTRYLT | | X | Q9YIJ1 |
| 172 | 2063 | YNLQEIVPGSVWME | | X | Q9YIJ1 |

### Example 13: Further Screen for Anti-AAV Antibodies in Human Sera

[0410] By using a cumulative gliding average signal of all sera tested over 4 consecutively aligned peptide signals along the corresponding AAV sequences, 1948 linear peptides were derived from AAV vectors AAV1, AAV2, AAV5, AAV6, AAV8, AAV9 and AAVrh. 10.

[0411] Detailed results are shown in Table 3 below. 63 top candidates with the strongest signals were assigned to group I corresponding to 3.2% of all AAV peptides analyzed by gliding average signal along the AAV VP1 sequence. The peptides of group I as well as the 135 peptides with second strongest signals were assigned to group II corresponding to 10.1% of all AAV peptides analyzed. Additional 82 peptides (assigned to group III) were derived from the top 200 ranked peptide signals of the present screen not covered by group I and II. In summary, groups I, II and III thus contain 280 linear peptides suitable (as basis for SADCs) to remove or to detect anti AAV antibodies, in particular antibodies directed against the AAV1, AAV2, AAV5, AAV6, AAV8, AAV9 and AAVrh. 10 VP1 proteins.

TABLE 3
This table provides a separate compilation of suitable
peptides covering stretches along the VP1 sequence of widely used
AAV vectors including AAV1, AAV2, AAV5, AAV6, AAV8, AAV9 and
AAVrh. 10. Source given is either UniProt ID, GenBank ID, PDB ID or
AAV strain name. The asterisk (*) indicates peptide sequences for
which a SEQ ID NO has already been assigned in Table 1 above.

| peptide | SEQ | | group | group | group | |
|---|---|---|---|---|---|---|
| # | ID NO | peptide | I | II | III | source |
| 1 | * | ADPPTAFNKDKLNSF | X | X | | Q6JC40 |
| 2 | 2064 | ADTMSAGGGGPLGDN | X | X | | Q9YIJ1 |
| 3 | * | AEFQERLKEDTSFGG | X | X | | spP03135 |
| 4 | 2065 | AKTAPGKKRPVEPSP | X | X | | Q8JQF8 |
| 5 | * | APTGKRIDDHFPKRK | X | X | | Q9YIJ1 |
| 6 | * | DKLNSFITQYSTGQV | X | X | | Q6JC40 |
| 7 | 2066 | DVYLQGPIWAKIPET | X | X | | Q9YIJ1 |
| 8 | * | EEEIKTTNPVATEEY | X | X | | Q8JQF8 |
| 9 | * | EEEIKTTNPVATEQY | X | X | | AAO88201.1 |
| 10 | * | EEEIRTTNPVATEQY | X | X | | spP03135 |
| 11 | * | EEIKTTNPVATEQYG | X | X | | AAO88201.1 |
| 12 | * | EIKTTNPVATEEYGI | X | X | | Q8JQF8 |
| 13 | * | EIRTTNPVATEQYGS | X | X | | spP03135 |
| 14 | * | ELKKENSKRWNPEIQ | X | X | | Q9YIJ1 |
| 15 | * | EMEWELKKENSKRWN | X | X | | Q9YIJ1 |
| 16 | * | ERDVYLQGPIWAKIP | X | X | | Q9YIJ1 |
| 17 | * | ERLKEDTSFGGNLGR | X | X | | spP03135 |
| 18 | * | EWELKKENSKRWNPE | X | X | | Q9YIJ1 |
| 19 | * | FITQYSTGQVSVEIE | X | X | | spP03135 |
| 20 | * | FITQYSTGQVTVEME | X | X | | Q9YIJ1 |
| 21 | * | FQERLKEDTSFGGNL | X | X | | spP03135 |
| 22 | 2067 | GAKTAPTGKRIDDHF | X | X | | Q9YIJ1 |
| 23 | 2068 | GQVATNHQSAQAQAQ | X | X | | Q6JC40 |
| 24 | * | IKTTNPVATEQYGVV | X | X | | AAO88201.1 |
| 25 | * | IQYTSNYNKSVNVDF | X | X | | spP03135 |
| 26 | * | KKENSKRWNPEIQYT | X | X | | Q9YIJ1 |
| 27 | * | KLNSFITQYSTGQVS | X | X | | Q6JC40 |
| 28 | 2069 | KTAPTGKRIDDHFPK | X | X | | Q9YIJ1 |
| 29 | * | KTTNPVATEEYGIVA | X | X | | Q8JQF8 |
| 30 | * | LKEDTSFGGNLGRAV | X | X | | spP03135 |
| 31 | * | LNSFITQYSTGQVSV | X | X | | Q6JC40 |
| 32 | 2070 | MNPLIDQYLYYLSKT | X | X | | Q6JC40 |
| 33 | 2071 | NHQYREIKSGSVDGS | X | X | | Q9YIJ1 |
| 34 | * | NSFITQYSTGQVSVE | X | X | | Q6JC40 |
| 35 | * | NTEGVYSEPRPIGTR | X | X | | Q6JC40 |
| 36 | * | PADPPTAFNKDKLNS | X | X | | Q6JC40 |
| 37 | * | PEIQYTSNYNKSVNV | X | X | | spP03135 |
| 38 | * | PLIDQYLYYLSKTIN | X | X | | Q6JC40 |
| 39 | 2072 | PTTFNQSKLNSFITQ | X | X | | Q8JQF8 |
| 40 | * | PVPADPPTAFNKDKL | X | X | | Q6JC40 |
| 41 | * | QGPIWAKIPETGAHF | X | X | | Q9YIJ1 |
| 42 | 2073 | QYREIKSGSVDGSNA | X | X | | Q9YIJ1 |
| 43 | * | REIKSGSVDGSNANA | X | X | | Q9YIJ1 |
| 44 | * | RTTNPVATEQYGSVS | X | X | | spP03135 |
| 45 | * | SEEEIKTTNPVATEQ | X | X | | AAO88201.1 |
| 46 | * | SFITQYSTGQVSVEI | X | X | | spP03135 |
| 47 | * | SSFITQYSTGQVTVE | X | X | | Q9YIJ1 |
| 48 | * | SSVMLTSEEEIKTTN | X | X | | AAO88201.1 |
| 49 | * | SSYAHSQSLDRLMNP | X | X | | spP03135 |
| 50 | * | SVMLTSEEEIKTTNP | X | X | | AAO88201.1 |
| 51 | 2074 | SYAHSQSLDRLMNPL | X | X | | spP03135 |
| 52 | * | TMSAGGGGPLGDNNQ | X | X | | Q9YIJ1 |
| 53 | * | TNPVATEEYGIVADN | X | X | | Q8JQF8 |
| 54 | * | TNPVATEQYGSVSTN | X | X | | spP03135 |
| 55 | * | TQTTGGTANTQTLGF | X | X | | Q8JQF8 |
| 56 | * | TTNPVATEQYGVVAD | X | X | | AAO88201.1 |
| 57 | * | VPADPPTAFNKDKLN | X | X | | Q6JC40 |
| 58 | 2075 | VYSEPRPIGTRYLTR | X | X | | spP03135 |
| 59 | * | WNPEIQYTSNYNKSV | X | X | | spP03135 |
| 60 | 2076 | YLQGPIWAKIPETGA | X | X | | Q9YIJ1 |
| 61 | * | YNNHQYREIKSGSVD | X | X | | Q9YIJ1 |
| 62 | * | YSSVMLTSEEEIKTT | X | X | | AAO88201.1 |
| 63 | * | YTSNYNKSVNVDFTV | X | X | | spP03135 |
| 64 | * | ADAEFQERLKEDTSF | | X | | spP03135 |
| 65 | * | AGPPKPKPNQQHQDQ | | X | | Q9YIJ1 |
| 66 | * | AGPSGLGSGTMAAGG | | X | | AAO88201.1 |
| 67 | * | ANNLTSTVQVFTDDD | | X | | Q9YIJ1 |
| 68 | * | CYRQQRVSTTTGQNN | | X | | Q8JQF8 |
| 69 | * | DPPTTFNQSKLNSFI | | X | | Q8JQF8 |
| 70 | 2077 | DSSSGTGKAGQQPAR | | X | | spP03135 |
| 71 | * | DSTTTIANNLTSTVQ | | X | | Q9YIJ1 |
| 72 | * | EDTSFGGNLGRAVFQ | | X | | spP03135 |
| 73 | * | EEGAKTAPGKKRPVE | | X | | Q8JQF8 |
| 74 | * | EEGAKTAPTGKRIDD | | X | | Q9YIJ1 |
| 75 | * | EEIKTTNPVATESYG | | X | | Q6JC40 |
| 76 | * | EFENVPFHSSYAHSQ | | X | | Q6JC40 |
| 77 | * | EGAKTAPGKKRPVEP | | X | | Q8JQF8 |
| 78 | * | EGLREFLGLEAGPPK | | X | | Q9YIJ1 |
| 79 | * | EIQYTSNYYKSTNVD | | X | | AAO88201.1 |
| 80 | * | EKTNVDIEKVMITDE | | X | | spP03135 |
| 81 | * | ELQKENSKRWNPEIQ | | X | | spP03135 |
| 82 | * | ENSKRWNPEIQYTNN | | X | | Q9YIJ1 |
| 83 | * | ENVPFHSSYAHSQSL | | X | | Q6JC40 |
| 84 | * | EPDSSSGTGKAGQQP | | X | | spP03135 |
| 85 | * | EQLEAGDNPYLKYNH | | X | | Q9YIJ1 |
| 86 | * | EWELQKENSKRWNPE | | X | | spP03135 |
| 87 | * | GAKTAPGKKRPVEPS | | X | | Q8JQF8 |
| 88 | * | GEPPAGPSGLGSGTM | | X | | AAO88201.1 |
| 89 | * | GGTANTQTLGFSQGG | | X | | Q8JQF8 |
| 90 | * | GSEKTNVDIEKVMIT | | X | | spP03135 |
| 91 | 2078 | GVVADNLQQQNAAPI | | X | | AAO88201.1 |
| 92 | * | GVYSEPRPIGTRYLT | | X | | spP03135 |
| 93 | 2079 | HSSFAPSQNLFKLAN | | X | | Q9YIJ1 |
| 94 | * | HSSYAHSQSLDRLMN | | X | | spP03135 |
| 95 | * | IKNTPVPADPPTAFN | | X | | Q6JC40 |
| 96 | * | IKTTNPVATESYGQV | | X | | Q6JC40 |
| 97 | * | ILIKNTPVPADPPTA | | X | | Q6JC40 |
| 98 | * | IQYTSNYYKSNNVEF | | X | | Q6JC40 |
| 99 | * | IQYTSNYYKSTNVDF | | X | | AAO88201.1 |
| 100 | * | ITNEEEIKTTNPVAT | | X | | Q6JC40 |
| 101 | * | ITQYSTGQVSVEIEW | | X | | spP03135 |
| 102 | 2080 | KDKLNSFITQYSTGQ | | X | | Q6JC40 |
| 103 | * | KNTPVPADPPTAFNK | | X | | Q6JC40 |
| 104 | * | KRWNPEIQYTSNYNK | | X | | spP03135 |
| 105 | 2081 | KRWNPEIQYTSNYYK | | X | | Q6JC40 |
| 106 | 2082 | LEAGDNPYLKYNHAD | | X | | Q9YIJ1 |
| 107 | * | LEAGPPKPKPNQQHQ | | X | | Q9YIJ1 |
| 108 | * | LGADTMSAGGGGPLG | | X | | Q9YIJ1 |
| 109 | * | LGLEAGPPKPKPNQQ | | X | | Q9YIJ1 |
| 110 | * | LIKNTPVPADPPTAF | | X | | Q6JC40 |
| 111 | 2083 | LKYNHADAEFQEKLA | | X | | Q9YIJ1 |
| 112 | * | LQKENSKRWNPEIQY | | X | | spP03135 |
| 113 | * | LREFLGLEAGPPKPK | | X | | Q9YIJ1 |
| 114 | * | LYYLSRTNTPSGTTT | | X | | spP03135 |
| 115 | * | NEEEIKTTNPVATES | | X | | Q6JC40 |
| 116 | * | NKDKLNSFITQYSTG | | X | | Q6JC40 |
| 117 | * | NNSNFAWTAGTKYHL | | X | | Q8JQF8 |
| 118 | * | NPVATEQYGVVADNL | | X | | AAO88201.1 |
| 119 | * | NPVATESYGQVATNH | | X | | Q6JC40 |
| 120 | 2084 | NSQGALPGMVWQNRD | | X | | Q8JQF8 |
| 121 | * | NTPVPADPPTAFNKD | | X | | Q6JC40 |
| 122 | * | NTPVPADPPTTFNQS | | X | | Q8JQF8 |
| 123 | 2085 | PADPPTTFNQSKLNS | | X | | Q8JQF8 |
| 124 | * | PFHSSFAPSQNLFKL | | X | | Q9YIJ1 |
| 125 | * | PIGEPPAGPSGLGSG | | X | | AAO88201.1 |
| 126 | 2086 | PPAGPSGLGSGTMAA | | X | | AAO88201.1 |
| 127 | * | PQILIKNTPVPADPP | | X | | Q6JC40 |
| 128 | * | PQYGYATLNRDNTEN | | X | | Q9YIJ1 |
| 129 | * | PSTSSDAEAGPSGSQ | | X | | Q9YIJ1 |
| 130 | * | PVATEQYGSVSTNLQ | | X | | spP03135 |
| 131 | * | PVEPDSSSGTGKAGQ | | X | | spP03135 |
| 132 | * | PVPADPPTTFNQSKL | | X | | Q8JQF8 |
| 133 | * | PVPGNITSFSDVPVS | | X | | Q9YIJ1 |
| 134 | 2087 | PYLKYNHADAEFQEK | | X | | Q9YIJ1 |
| 135 | * | QILIKNTPVPADPPT | | X | | Q6JC40 |
| 136 | * | QRVSTTTGQNNNSNF | | X | | Q8JQF8 |
| 137 | 2088 | QSGASNDNHYFGYST | | X | | spP03135 |
| 138 | 2089 | QSTGGTAGTQQLLFS | | X | | AAO88201.1 |
| 139 | * | QVTVEMEWELKKENS | | X | | Q9YIJ1 |
| 140 | 2090 | QYGVVADNLQQQNAA | | X | | AAO88201.1 |
| 141 | * | QYTSNYYKSNNVEFA | | X | | Q6JC40 |
| 142 | * | RQQRVSTTTGQNNNS | | X | | Q8JQF8 |
| 143 | 2091 | RWNPEIQYTSNYYKS | | X | | Q6JC40 |
| 144 | 2092 | SFAPSQNLFKLANPL | | X | | Q9YIJ1 |
| 145 | * | SGNWHCDSTWLGDRV | | X | | Q8JQF8 |
| 146 | 2093 | SKRWNPEIQYTSNYY | | X | | Q6JC40 |
| 147 | * | SNYNKSVNVDFTVDT | | X | | spP03135 |
| 148 | 2094 | SQSGASNDNHYFGYS | | X | | spP03135 |
| 149 | 2095 | SRTNTPSGTTTQSRL | | X | | spP03135 |
| 150 | * | SSGNWHCDSTWLGDR | | X | | Q8JQF8 |
| 151 | * | SSGTGKAGQQPARKR | | X | | spP03135 |
| 152 | * | SSLGADTMSAGGGGP | | X | | Q9YIJ1 |
| 153 | * | SSQSGASNDNHYFGY | | X | | spP03135 |
| 154 | * | SSSGNWHCDSTWLGD | | X | | Q8JQF8 |
| 155 | * | STGGTAGTQQLLFSQ | | X | | AAO88201.1 |
| 156 | * | STTLSQNNNSNFAWT | | X | | AAO88201.1 |
| 157 | 2096 | SYGQVATNHQSAQAQ | | X | | Q6JC40 |
| 158 | 2097 | TANTQTLGFSQGGPN | | X | | Q8JQF8 |
| 159 | * | TEGVYSEPRPIGTRY | | X | | Q6JC40 |
| 160 | 2098 | TEQYGVVADNLQQQN | | X | | AAO88201.1 |
| 161 | * | TESYGQVATNHQSAQ | | X | | Q6JC40 |
| 162 | * | TGGTAGTQQLLFSQA | | X | | AAO88201.1 |
| 163 | 2099 | TGQNNNSNFAWTAGT | | X | | Q8JQF8 |
| 164 | * | TLNRDNTENPTERSS | | X | | Q9YIJ1 |
| 165 | * | TLSQNNNSNFAWTGA | | X | | AAO88201.1 |
| 166 | * | TNGVYSEPRPIGTRY | | X | | spP03135 |
| 167 | * | TNTPSGTTTQSRLQF | | X | | spP03135 |
| 168 | * | TNVDIEKVMITDEEE | | X | | spP03135 |
| 169 | * | TQSTGGTAGTQQLLF | | X | | AAO88201.1 |
| 170 | * | TQYSTGQVSVEIEWE | | X | | spP03135 |
| 171 | * | TQYSTGQVTVEMEWE | | X | | Q9YIJ1 |
| 172 | * | TSNYYKSNNVEFAVN | | X | | Q6JC40 |
| 173 | * | TSSDAEAGPSGSQQL | | X | | Q9YIJ1 |
| 174 | * | TTGGTANTQTLGFSQ | | X | | Q8JQF8 |
| 175 | * | TTLSQNNNSNFAWTG | | X | | AAO88201.1 |
| 176 | 2100 | TTNPVATESYGQVAT | | X | | Q6JC40 |
| 177 | * | TTTGQNNNSNFAWTA | | X | | Q8JQF8 |
| 178 | * | TVEMEWELKKENSKR | | X | | Q9YIJ1 |
| 179 | * | VATEQYGVVADNLQQ | | X | | AAO88201.1 |
| 180 | * | VATESYGQVATNHQS | | X | | Q6JC40 |
| 181 | * | VATNHQSAQAQAQTG | | X | | Q6JC40 |
| 182 | * | VDIEKVMITDEEEIR | | X | | spP03135 |
| 183 | * | VDTNGVYSEPRPIGT | | X | | spP03135 |
| 184 | * | VEIEWELQKENSKRW | | X | | spP03135 |
| 185 | * | VNTEGVYSEPRPIGT | | X | | Q6JC40 |
| 186 | * | VQDSTTTIANNLTST | | X | | Q9YIJ1 |
| 187 | * | VSTTLSQNNNSNFAW | | X | | AAO88201.1 |
| 188 | * | VSTTTGQNNNSNFAW | | X | | Q8JQF8 |
| 189 | * | VTVQDSTTTIANNLT | | X | | Q9YIJ1 |
| 190 | 2101 | WTGATKYHLNGRDSL | | X | | spP03135 |
| 191 | 2102 | YAHSQSLDRLMNPLI | | X | | spP03135 |
| 192 | * | YATLNRDNTENPTER | | X | | Q9YIJ1 |
| 193 | * | YGYATLNRDNTENPT | | X | | Q9YIJ1 |
| 194 | * | YLSRTNTPSGTTTQS | | X | | spP03135 |
| 195 | * | YNKSVNVDFTVDTNG | | X | | spP03135 |
| 196 | * | YNNHLYKQISNGTSG | | X | | Q8JQF8 |
| 197 | * | YSTGQVTVEMEWELK | | X | | Q9YIJ1 |
| 198 | 2103 | YTSNYYKSNNVEFAV | | X | | Q6JC40 |
| 199 | * | ASHKDDEEKFFPQSG | | | X | spP03135 |
| 200 | * | ASNDNHYFGYSTPWG | | | X | spP03135 |
| 201 | * | ATERFGTVAVNLQSS | | | X | O56137 |
| 202 | * | AVNLQSSSTDPATGD | | | X | O56137 |
| 203 | * | DAAALEHDKAYDQQL | | | X | Q6JC40 |
| 204 | * | DAEFQERLQEDTSFG | | | X | Q8JQF8 |
| 205 | * | DDEEKFFPQSGVLIF | | | X | spP03135 |
| 206 | * | EDSKPSTSSDAEAGP | | | X | Q9YIJ1 |
| 207 | * | EDVPFHSSYAHSQSL | | | X | spP03135 |
| 208 | * | EEEIKATNPVATERF | | | X | Q9WBP8 |
| 209 | * | EEVGEGLREFLGLEA | | | X | Q9YIJ1 |
| 210 | * | EEYGIVADNLQQQNT | | | X | Q8JQF8 |
| 211 | * | EFLGLEAGPPKPKPN | | | X | Q9YIJ1 |
| 212 | * | EHDKAYDQQLKAGDN | | | X | Q6JC40 |
| 213 | * | EHDKAYDRQLDSGDN | | | X | spP03135 |
| 214 | * | EIKATNPVATERFGT | | | X | Q9WBP8 |
| 215 | * | EPDSSAGIGKSGAQP | | | X | Q6JC40 |
| 216 | * | EPVNAADAAALEHDK | | | X | Q6JC40 |
| 217 | * | EPVNEADAAALEHDK | | | X | spP03135 |
| 218 | * | ERHKDDSRGLVLPGY | | | X | spP03135 |
| 219 | * | ESVPDPQPIGEPPAA | | | X | Q6JC40 |
| 220 | * | EVPFHSSFAPSQNLF | | | X | Q9YIJ1 |
| 221 | * | FHSSYAHSQSLDRLM | | | X | spP03135 |
| 222 | * | FNGLDKGEPVNAADA | | | X | Q8JQF8 |
| 223 | * | FNGLDKGEPVNEADA | | | X | spP03135 |
| 224 | * | GEPVNAADAAALEHD | | | X | Q6JC40 |
| 225 | * | GEPVNEADAAALEHD | | | X | spP03135 |
| 226 | * | GNGLDKGEPVNAADA | | | X | Q6JC40 |
| 227 | * | GSAHQGCLPPFPADV | | | X | spP03135 |
| 228 | * | GSSSGNWHCDSTWLG | | | X | Q8JQF8 |
| 229 | * | IGTVNSQGALPGMVW | | | X | Q8JQF8 |
| 230 | * | IQVKEVTTNDGVTTI | | | X | Q9WBP8 |
| 231 | * | LIKNTPVPADPPTTF | | | X | Q8JQF8 |
| 232 | * | LRTGNNFEFSYQFED | | | X | AAO88201.1 |
| 233 | * | NEADAAALEHDKAYD | | | X | spP03135 |
| 234 | * | NNNSEFAWPGASSWA | | | X | Q6JC40 |
| 235 | * | NNSEYSWTGATKYHL | | | X | spP03135 |
| 236 | * | NVGGQMATNNQSSTT | | | X | Q9YIJ1 |
| 237 | * | NYNDPQFVDFAPDST | | | X | Q9YIJ1 |
| 238 | * | PLGEPPATPAAVGPT | | | X | Q9WBP8 |
| 239 | * | PQPLGEPPATPAAVG | | | X | Q9WBP8 |
| 240 | * | PSKMLRTGNNFEFTY | | | X | Q9YIJ1 |
| 241 | * | PVATEEYGIVADNLQ | | | X | Q8JQF8 |
| 242 | * | PVEPSPQRSPDSSTG | | | X | Q8JQF8 |
| 243 | * | PVEQSPQEPDSSSGI | | | X | Q9WBP8 |
| 244 | * | PVNEADAAALEHDKA | | | X | spP03135 |
| 245 | * | PVPANPPAEFSATKF | | | X | Q9WBP8 |
| 246 | * | QQRVSTTLSQNNNSN | | | X | AAO88201.1 |
| 247 | * | QRVSKTKTDNNNSNF | | | X | Q9WBP8 |
| 248 | * | QRVSTTLSQNNNSNF | | | X | AAO88201.1 |
| 249 | * | QSSSTDPATGDVHVM | | | X | O56137 |
| 250 | * | QYTNNYNDPQFVDFA | | | X | Q9YIJ1 |
| 251 | * | RVSTTLSQNNNSNFA | | | X | AAO88201.1 |
| 252 | * | SDSEYQLPYVLGSAH | | | X | Q9WBP8 |
| 253 | * | SESVPDPQPIGEPPA | | | X | AAO88201.1 |
| 254 | * | SESVPDPQPLGEPPA | | | X | Q8JQF8 |
| 255 | * | SFVDHPPDWLEEVGE | | | X | Q9YIJ1 |
| 256 | * | SSNDNAYFGYSTPWG | | | X | Q6JC40 |
| 257 | * | SSSGIGKTGQQPAKK | | | X | Q9WBP8 |
| 258 | * | STTVTQNNNSEFAWP | | | X | Q6JC40 |
| 259 | * | SVPDPQPLGEPPAAP | | | X | Q8JQF8 |
| 260 | * | SVPDPQPLGEPPATP | | | X | Q9WBP8 |
| 261 | * | SYEFENVPFHSSYAH | | | X | Q6JC40 |
| 262 | * | SYTFEDVPFHSSYAH | | | X | spP03135 |
| 263 | * | TDEEEIKATNPVATE | | | X | Q9WBP8 |
| 264 | * | TDEEEIRTTNPVATE | | | X | spP03135 |
| 265 | * | TGNNFEFSYQFEDVP | | | X | AAO88201.1 |
| 266 | * | TMATGSGAPMADNNE | | | X | spP03135 |
| 267 | * | TNNYNDPQFVDFAPD | | | X | Q9YIJ1 |
| 268 | * | TNTMATGSGAPMADN | | | X | spP03135 |
| 269 | * | TPVPADPPTAFNKDK | | | X | Q6JC40 |
| 270 | * | TPVPADPPTTFSQAK | | | X | AAO88201.1 |
| 271 | * | TSTVQVFTDSEYQLP | | | X | spP03135 |
| 272 | * | TSVDFAVNTEGVYSE | | | X | Q8JQF8 |
| 273 | * | TVAVNLQSSSTDPAT | | | X | O56137 |
| 274 | * | VDFAVNTEGVYSEPR | | | X | Q8JQF8 |
| 275 | * | VEFAVNTEGVYSEPR | | | X | Q6JC40 |
| 276 | * | VLEPLGLVEEGAKTA | | | X | Q8JQF8 |
| 277 | * | VNVDFTVDTNGVYSE | | | X | spP03135 |
| 278 | * | VSVEIEWELQKENSK | | | X | spP03135 |
| 279 | * | WLEDNLSEGIREWWD | | | X | Q9WBP8 |
| 280 | * | YNEQLEAGDNPYLKY | | | X | Q9YIJ1 |

### Example 14: Further Screen for Anti-Vector Antibodies in Human Sera

[0412] Out of the 3285 cyclic peptides derived from Ad5 Hexon, fiber and penton proteins P04133, P11818 and P12538, respectively, and AAV VP1 sequences P03135, Q6JC40, Q8JQF8, Q9WBP8, Q9YIJ1, 056137, AA088201.1, 041855, 056139 and Q8JQG0, the peptides with the top 5% maximal IgG signal strength over the microarray screens were obtained, yielding a total of 164 peptides with top signals from the vector protein sequences screened. The details are shown in Table 4 below.

TABLE 4
This table provides another compilation of viral peptide
sequences suitable as a basis for the present invention.
Specifically, these are suited to be used for SADCs according to
the present invention. Source given is either UniProt ID or GenBank
ID. The asterisk (*) indicates peptide sequences for which a SEQ ID
NO has already been assigned in Table 2 above.

| peptide | SEQ | | |
|---|---|---|---|
| # | ID NO | peptide | source |
| 1 | 2104 | AAEAAAPAAQPEVE | P12538 |
| 2 | 2105 | AAAPAAQPEVEKPQ | P12538 |
| 3 | 2106 | DASEYLSPGLVQFA | P04133 |
| 4 | 2107 | DGLEFGSPNAPNTN | P11818 |
| 5 | 2108 | APVAAALGSPFDAP | P12538 |
| 6 | 2109 | NLEEEDDDNEDEVD | P04133 |
| 7 | 2110 | EEDDDNEDEVDEQA | P04133 |
| 8 | 2111 | DDNEDEVDEQAEQQ | P04133 |
| 9 | 2112 | VLQSSLGNDLRVDG | P04133 |
| 10 | 2113 | PSEDTFNPVYPYDT | P11818 |
| 11 | 2114 | FPVVGAELLPVHSK | P12538 |
| 12 | 2115 | EEIRPTNPVATEEY | Q8JQG0 |
| 13 | 2116 | SGSGAEENSNAAAA | P12538 |
| 14 | 2117 | YEEGPPPSYESVVS | P12538 |
| 15 | 2118 | NAAAAAMQPVEDMN | P12538 |
| 16 | 2119 | AAALGSPFDAPLDP | P12538 |
| 17 | 2120 | NGVLESDIGVKFDT | P12538 |
| 18 | 2121 | AAAMQPVEDMNDHA | P12538 |
| 19 | 2122 | PAQPASSLGADTMS | Q9YIJ1 |
| 20 | 2123 | TVQVFTDDDYQLPY | Q9YIJ1 |
| 21 | 2124 | PVPGNITSFSDVPV | Q9YIJ1 |
| 22 | 2125 | TQYSTGQVTVEMEW | Q9YIJ1 |
| 23 | 2126 | YLGPGNGLDRGEPV | Q9YIJ1 |
| 24 | 2127 | TSESETQPVNRVAY | Q9YIJ1 |
| 25 | 2128 | RARPSEDTFNPVYP | P11818 |
| 26 | 2129 | ATALEINLEEEDDD | P04133 |
| 27 | 2130 | ENSNAAAAAMQPVE | P12538 |
| 28 | 2131 | YLGPFNGLDKGEPV | P03135 |
| 29 | 2132 | NNFEFSYSFEDVPF | Q8JQG0 |
| 30 | 2133 | SFITQYSTGQVTVE | Q9YIJ1 |
| 31 | 2134 | YNKSVNVDFTVDTN | P03135 |
| 32 | 2135 | LGSPFDAPLDPPFV | P12538 |
| 33 | 2136 | PAAQPEVEKPQKKP | P12538 |
| 34 | 2137 | ENSKRWNPEIQYTN | Q9YIJ1 |
| 35 | 2138 | YLVDNKSTDVASLN | P12538 |
| 36 | 2139 | PPMMLIKNTPVPGN | Q9YIJ1 |
| 37 | 2140 | PVPADPPTTFSQAK | AAO88201.1 |
| 38 | 2141 | DTFNPVYPYDTETG | P11818 |
| 39 | 2142 | ITQYSTGQVTVEME | Q9YIJ1 |
| 40 | 2143 | AGNLTSQNVTTVSP | P11818 |
| 41 | 2144 | NNFTFSYTFEDVPF | P03135 |
| 42 | 2145 | WVLPSYNNHQYREI | Q9YIJ1 |
| 43 | 2146 | YLGPGNGLDKGEPV | Q6JC40 |
| 44 | 2147 | FLYSNIALYLPDKL | P04133 |
| 45 | 2148 | NSTGNMGVLAGQAS | P04133 |
| 46 | 2149 | YLKYNHADAEFQER | P03135 |
| 47 | 2150 | LAPKGAPNPCEWDE | P04133 |
| 48 | 2151 | IQYTNNYNDPQFVD | Q9YIJ1 |
| 49 | 2152 | SHGKTAKSNIVSQV | P11818 |
| 50 | 2153 | VSAAPVAAALGSPF | P12538 |
| 51 | 2154 | GNDRLLTPNEFEIK | P04133 |
| 52 | 2155 | LEINLEEEDDDNED | P04133 |
| 53 | 2156 | YLRYNHADAEFQER | Q8JQF8 |
| 54 | 2157 | AAGGAAVEGGQGAD | O41855 |
| 55 | 2158 | VKEVTTSNGETTVA | O41855 |
| 56 | 2159 | EAMLRNDTNDQSFN | P04133 |
| 57 | 2160 | DGHFHPSPLIGGFG | O41855 |
| 58 | 2161 | NMTKDWFLVQMLAN | P04133 |
| 59 | 2162 | VGSGTVAAGGGAPM | Q8JQG0 |
| 60 | 2163 | EQYGTVANNLQSSN | O56139 |
| 61 | 2164 | CLEYFPSKMLRTGN | Q9YIJ1 |
| 62 | 2165 | AHALDMTFEVDPMD | P04133 |
| 63 | 2166 | TMANQAKNWLPGPC | Q8JQF8 |
| 64 | 2167 | KRPVEQSPQEPDSS | Q6JC40 |
| 65 | 2168 | KTANDNNNSNFPWT | O56139 |
| 66 | 2169 | TQNNNSEFAWPGAS | Q6JC40 |
| 67 | 2170 | KNTPVPADPPTAFN | Q6JC40 |
| 68 | 2171 | TVQVFSDSEYQLPY | Q9WBP8 |
| 69 | 2172 | LDKGEPVNAADAAA | Q6JC40 |
| 70 | 2173 | VLEPLGLVEEPVKT | P03135 |
| 71 | 2174 | KLFNIQVKEVTTND | Q9WBP8 |
| 72 | 2175 | LQSSNTAPTTRTVN | 056139 |
| 73 | 2176 | SPPLKKTKSNINLE | P11818 |
| 74 | 2177 | LDKGEPVNEADAAA | P03135 |
| 75 | 2178 | MLRTGNNFQFSYEF | Q6JC40 |
| 76 | 2179 | ARKRLNFGQTGDAD | P03135 |
| 77 | 2180 | NTYNGFSTPWGYFD | O41855 |
| 78 | 2181 | QYGTVANNLQSSNT | O56139 |
| 79 | 2182 | LARPPAPTITTVSE | P12538 |
| 80 | 2183 | FPADVFMIPQYGYL | Q6JC40 |
| 81 | 2184 | STGQVSVEIEWELQ | P03135 |
| 82 | 2185 | LRNDTNDQSFNDYL | P04133 |
| 83 | 2186 | NFQFSYEFENVPFH | Q6JC40 |
| 84 | 2187 | FITQYSTGQVTVEM | Q9YIJ1 |
| 85 | 2188 | QQPARKRLNFGQTG | P03135 |
| 86 | 2189 | HDSKLSIATQGPLT | P11818 |
| 87 | 2190 | NTYFGYSTPWGYFD | Q8JQF8 |
| 88 | * | ANNLTSTVQIFADS | O41855 |
| 89 | * | GNTSQQQTDRNAFY | O41855 |
| 90 | * | DTNGVYSEPRPIGT | P03135 |
| 91 | * | KIFNIQVKEVTTSN | O41855 |
| 92 | * | LIKNTPVPADPPTT | Q8JQF8 |
| 93 | * | DEEEIRTTNPVATE | P03135 |
| 94 | * | DKAYDRQLDSGDNP | P03135 |
| 95 | * | DKDKFFPMSGVMIF | O56137 |
| 96 | * | LQQQNTAPQIGTVN | Q8JQF8 |
| 97 | * | GTNTMATGSGAPMA | P03135 |
| 98 | * | IFNIQVKEVTTSNG | O41855 |
| 99 | * | DKAYDQQLQAGDNP | Q8JQF8 |
| 100 | * | DSQWLGDRVITTST | Q6JC40 |
| 101 | * | DEEEIKATNPVATE | Q9WBP8 |
| 102 | * | SFITQYSTGQVSVE | P03135 |
| 103 | * | PLVDQYLYRFVSTN | Q9YIJ1 |
| 104 | * | GKKRPVDQSPQEPD | O56139 |
| 105 | * | NPVATEQYGSVSTN | P03135 |
| 106 | * | DKAYDQQLKAGDNP | Q6JC40 |
| 107 | * | TAPGKKRPVDQSPQ | O56139 |
| 108 | * | VMITDEEEIRTTNP | P03135 |
| 109 | * | FGKQGSEKTNVDIE | P03135 |
| 110 | * | LQRGNRQAATADVN | P03135 |
| 111 | * | KTAPGKKRPVDQSP | O56139 |
| 112 | * | SESVPDPQPIGEPP | AAO88201.1 |
| 113 | * | LEDNLSEGIREWWD | Q9WBP8 |
| 114 | * | PEIQYTSNYNKSVN | P03135 |
| 115 | * | DKFFPMSGVMIFGK | Q9WBP8 |
| 116 | * | APGKKRPVDQSPQE | O56139 |
| 117 | * | NNFQFSYTFEDVPF | O56139 |
| 118 | * | EFAWPGASSWALNG | Q6JC40 |
| 119 | * | QSSNTAPTTRTVND | O56139 |
| 120 | * | PVPADPPTTFNQSK | Q8JQF8 |
| 121 | * | TQYSTGQVSVEIEW | P03135 |
| 122 | * | SKTANDNNNSNFPW | O56139 |
| 123 | * | TVQIFADSSYELPY | O41855 |
| 124 | * | SESVPDPQPLGEPP | Q8JQF8 |
| 125 | * | TESVPDPQPIGEPP | Q6JC40 |
| 126 | * | KNTPVPADPPTTFS | AAO88201.1 |
| 127 | * | PVPADPPTAFNKDK | Q6JC40 |
| 128 | * | KKRPVDQSPQEPDS | O56139 |
| 129 | * | KNTPVPADPPTTFN | Q8JQF8 |
| 130 | * | PRDWQRLINNNWGF | P03135 |
| 131 | * | LFNIQVKEVTTNDG | Q9WBP8 |
| 132 | * | TTSGTTNQSRLLFS | O56139 |
| 133 | * | LSKTANDNNNSNFP | O56139 |
| 134 | * | ENSKRWNPEIQYTS | P03135 |
| 135 | * | DIYYQGPIWAKIPH | 041855 |
| 136 | * | DDEDKFFPMSGVMI | Q9WBP8 |
| 137 | * | THSTLDGRWSALTP | O41855 |
| 138 | * | GADGVGNSSGNWHC | P03135 |
| 139 | * | TIANNLTSTIQVFT | Q8JQF8 |
| 140 | * | PQILIKNTPVPADP | Q6JC40 |
| 141 | * | QLKAGDNPYLRYNH | Q9WBP8 |
| 142 | * | NYNKSVNVDFTVDT | P03135 |
| 143 | * | EEEIKTTNPVATEE | Q8JQF8 |
| 144 | * | KGEPVNEADAAALE | P03135 |
| 145 | * | KGEPVNAADAAALE | Q6JC40 |
| 146 | * | DGHFHPSPLMGGFG | P03135 |
| 147 | * | HYFGYSTPWGYFDF | P03135 |
| 148 | * | EEIKTTNPVATEQY | AAO88201.1 |
| 149 | * | FNIQVKEVTTNDGV | Q9WBP8 |
| 150 | * | PWGYFDFNRFHCHF | P03135 |
| 151 | * | LQQQNAAPIVGAVN | AAO88201.1 |
| 152 | * | DWLEDNLSEGIREW | Q6JC40 |
| 153 | * | WLEDNLSEGIREWW | Q6JC40 |
| 154 | * | DSESVPDPQPIGEP | AAO88201.1 |
| 155 | * | KRPVDQSPQEPDSS | O56139 |
| 156 | * | HSQSLDRLMNPLID | P03135 |
| 157 | * | FEKVPFHSMYAHSQ | O41855 |
| 158 | * | YDQQLKAGDNPYLK | Q6JC40 |
| 159 | * | EDNLSEGIREWWDL | Q9WBP8 |
| 160 | * | QVKEVTTNDGVTTI | Q9WBP8 |
| 161 | * | PQYGYLTLNNGSQA | P03135 |
| 162 | * | EEEIKTTNPVATES | Q6JC40 |
| 163 | * | EGADGVGNASGNWH | Q9WBP8 |
| 164 | * | DSESVPDPQPLGEP | Q8JQF8 |

[0413] Thus, all listed peptides, preferably peptides belonging to the Top 10% Hits, provide sequences from which shorter peptide sequences can be derived for (transient) antibody depletion with the compound according to the present invention. In addition, these peptides and fragments thereof can also be used as probes for the diagnostic detection of anti-AAV or anti-AdV antibodies in biological samples such as human sera.

### Example 15: Identification of Epitopes for the Transient Depletion of Anti-Measles Virus Antibodies

[0414] Three structurally especially exposed regions of Measles Virus hemagglutinin glycoprotein H were selected, spanning amino-acid residues 290-335, 365-416 and 571-610 (numbering based on UniProt sequence entry P08362). Based on this selection, 140 cyclic 16mer peptides were synthesized starting from each single amino-acid position out of these three regions.

[0415] Samples obtained from human donors were screened for antibodies against these measles virus-derived peptides immobilized on microarrays. To this end, IgG was prepared from blood obtained from the human donors by protein G purification. Each IgG sample was incubated with the peptide microarrays and Ig binding signals were detected by fluorescence

[0416] The Top 25% IgG binding hits derived from the plasma samples screened, are listed in Table 5 below. The peptides belonging to the Top 10% hits and the corresponding starting amino-acid positions within UniProt sequence entry P08362 are specifically indicated.

TABLE 5

| peptide | SEQ | starting pos. | | |
|---|---|---|---|---|
| # | ID NO | in P08362 | peptide | top 10% |
| 1 | 2191 | 290 | ALGELKLAALCHGEDS | |
| 2 | 2192 | 299 | LCHGEDSITIPYQGSG | |
| 3 | 2193 | 302 | GEDSITIPYQGSGKGV | X |
| 4 | 2194 | 303 | EDSITIPYQGSGKGVS | X |
| 5 | 2195 | 304 | DSITIPYQGSGKGVSF | X |
| 6 | 2196 | 307 | TIPYQGSGKGVSFQLV | |
| 7 | 2197 | 308 | IPYQGSGKGVSFQLVK | |
| 8 | 2198 | 309 | PYQGSGKGVSFQLVKL | X |
| 9 | 2199 | 310 | YQGSGKGVSFQLVKLG | |
| 10 | 2200 | 311 | QGSGKGVSFQLVKLGV | |
| 11 | 2201 | 313 | SGKGVSFQLVKLGVWK | X |
| 12 | 2202 | 314 | GKGVSFQLVKLGVWKS | X |
| 13 | 2203 | 366 | AVPTTRTDDKLRMETC | |
| 14 | 2204 | 367 | VPTTRTDDKLRMETCF | X |
| 15 | 2205 | 368 | PTTRTDDKLRMETCFQ | |
| 16 | 2206 | 373 | DDKLRMETCFQQACKG | |
| 17 | 2207 | 374 | DKLRMETCFQQACKGK | X |
| 18 | 2208 | 375 | KLRMETCFQQACKGKI | X |
| 19 | 2209 | 376 | LRMETCFQQACKGKIQ | |
| 20 | 2210 | 388 | GKIQALCENPEWAPLK | |
| 21 | 2211 | 390 | IQALCENPEWAPLKDN | |
| 22 | 2212 | 391 | QALCENPEWAPLKDNR | |
| 23 | 2213 | 392 | ALCENPEWAPLKDNRI | |
| 24 | 2214 | 393 | LCENPEWAPLKDNRIP | X |
| 25 | 2215 | 394 | CENPEWAPLKDNRIPS | |
| 26 | 2216 | 396 | NPEWAPLKDNRIPSYG | |
| 27 | 2217 | 397 | PEWAPLKDNRIPSYGV | |
| 28 | 2218 | 398 | EWAPLKDNRIPSYGVL | X |
| 29 | 2219 | 401 | PLKDNRIPSYGVLSVD | X |
| 30 | 2220 | 574 | DQKLWCRHFCVLADSE | X |
| 31 | 2221 | 581 | HFCVLADSESGGHITH | |
| 32 | 2222 | 585 | LADSESGGHITHSGME | |
| 33 | 2223 | 587 | DSESGGHITHSGMEGM | X |
| 34 | 2224 | 588 | SESGGHITHSGMEGMG | X |
| 35 | 2225 | 589 | ESGGHITHSGMEGMGV | |

[0417] Thus, all listed peptides, preferably peptides belonging to the Top 10% hits, provide sequences from which shorter peptide sequences can be derived for (transient) antibody depletion with the compound according to the present invention. In addition, these peptides and fragments thereof can also be used as probes for the diagnostic detection of anti-measles virus antibodies in biological samples such as human sera.

### Non-Patent References

[0418] Apolonio, Jonathan Santos, et al. “Oncolytic virus therapy in cancer: A current review.” World Journal of Virology 10.5 (2021): 229.

[0419] Balakrishnan, Balaji, and Ernest David. “Biopolymers augment viral vectors based gene delivery.” Journal of biosciences 44.4 (2019): 1-8.

[0420] Bennett, Antonette, et al. “Structure comparison of the chimeric AAV2. 7m8 vector with parental AAV2.” Journal of structural biology 209.2 (2020): 107433.

[0421] Bertin, Berangere, et al. “Capsid-specific removal of circulating antibodies to adeno-associated virus vectors.” Scientific reports 10.1 (2020): 1-11.

[0422] Bhatt, Darshak K., Roger Chammas, and Toos Daemen. “Resistance mechanisms influencing oncolytic virotherapy, a systematic analysis.” Vaccines 9.10 (2021): 1166.

[0423] Börner, Kathleen, et al. “Pre-arrayed pan-AAV peptide display libraries for rapid single-round screening.” Molecular Therapy 28.4 (2020): 1016-1032.

[0424] Bruno, John G. “Potential inherent stimulation of the innate immune system by nucleic acid aptamers and possible corrective approaches.” Pharmaceuticals 11.3 (2018): 62.

[0425] Carter, John Mark, and Larry Loomis-Price. “B cell epitope mapping using synthetic peptides.” Current protocols in immunology 60.1 (2004): 9-4.

[0426] Cearley, Cassia N., et al. “Expanded repertoire of AAV vector serotypes mediate unique patterns of transduction in mouse brain.” Molecular therapy 16.10 (2008): 1710-1718.

[0427] Colella, Pasqualina, Giuseppe Ronzitti, and Federico Mingozzi. “Emerging issues in AAV-mediated in vivo gene therapy.” Molecular Therapy-Methods & Clinical Development 8 (2018): 87-104.

[0428] Condit, Richard C., Nissin Moussatche, and Paula Traktman. “In a nutshell: structure and assembly of the vaccinia virion.” Advances in virus research 66 (2006): 31-124.

[0429] Cook, Joselle, et al. “Oncolytic virotherapy-Forging its place in the immunomodulatory paradigm for Multiple Myeloma.” Cancer Treatment and Research Communications 29 (2021): 100473.

[0430] Conry, Robert M., et al. “Talimogene laherparepvec: First in class oncolytic virotherapy.” Human vaccines & immunotherapeutics 14.4 (2018): 839-846.

[0431] Cristi, Francisca, et al. “Genetic modifications that expand oncolytic virus potency.” Frontiers in Molecular Biosciences 9 (2022): 25.

[0432] De Matos, Ana Lemos, Lina S. Franco, and Grant McFadden. “Oncolytic viruses and the immune system: the dynamic duo.” Molecular Therapy-Methods & Clinical Development 17 (2020): 349-358.

[0433] De Sostoa, Jana, Valérie Dutoit, and Denis Migliorini. “Oncolytic viruses as a platform for the treatment of malignant brain tumors.” International journal of molecular sciences 21.20 (2020): 7449.

[0434] Dijkstra, C. D., et al. “The heterogeneity of mononuclear phagocytes in lymphoid organs: distinct macrophage subpopulations in rat recognized by monoclonal antibodies ED1, ED2 and ED3.” Microenvironments in the Lymphoid System. Springer, Boston, MA, 1985. 409-419.

[0435] Domenger, Claire, and Dirk Grimm. “Next-generation AAV vectors-do not judge a virus (only) by its cover.” Human molecular genetics 28.R1 (2019): R3-R14.

[0436] Elliott, Serra E., et al. “A pre-eclampsia-associated Epstein-Barr virus antibody cross-reacts with placental GPR50.” Clinical Immunology 168 (2016): 64-71.

[0437] Engeland, Christine E., and Guy Ungerechts. “Measles virus as an oncolytic immunotherapy.” Cancers 13.3 (2021): 544.

[0438] Erlandsson, Ann, et al. “In vivo clearing of idiotypic antibodies with antiidiotypic antibodies and their derivatives.” Molecular immunology 43.6 (2006): 599-606.

[0439] Etzerodt, Anders, et al. “Efficient intracellular drug-targeting of macrophages using stealth liposomes directed to the hemoglobin scavenger receptor CD163.” Journal of controlled release 160.1 (2012): 72-80.

[0440] Fabriek, Babs O., et al. “The macrophage scavenger receptor CD163 functions as an innate immune sensor for bacteria.” Blood 113.4 (2009): 887-892.

[0441] Fausther-Bovendo, Hugues, and Gary P. Kobinger. “Pre-existing immunity against Ad vectors: humoral, cellular, and innate response, what's important?.” Human vaccines & immunotherapeutics 10.10 (2014): 2875-2884.

[0442] Feiner, Rebecca C., et al. “EGFR-binding peptides: From computational design towards tumor-targeting of adeno-associated virus capsids.” International journal of molecular sciences 21.24 (2020): 9535.

[0443] Foloppe, Johann, et al. “The enhanced tumor specificity of TG6002, an armed oncolytic vaccinia virus deleted in two genes involved in nucleotide metabolism.” Molecular Therapy-Oncolytics 14 (2019): 1-14.

[0444] Gao, Yang, et al. “The application of oncolytic viruses in cancer therapy.” Biotechnology Letters 43.10 (2021): 1945-1954.

[0445] Garces, Jorge Carlos, et al. “Antibody-mediated rejection: a review.” The Ochsner Journal 17.1 (2017): 46.

[0446] Gazarian, Karlen, et al. “Mimotope peptides selected from phage display combinatorial library by serum antibodies of pigs experimentally infected with Taenia solium as leads to developing diagnostic antigens for human neurocysticercosis.” Peptides 38.2 (2012): 381-388.

[0447] Gfeller, David, et al. “Current tools for predicting cancer-specific T cell immunity.” Oncoimmunology 5.7 (2016): e1177691.

[0448] Granfeldt, Asger, et al. “Targeting dexamethasone to macrophages in a porcine endotoxemic model.” Critical Care Medicine 41.11 (2013): e309-e318.

[0449] Graversen, Jonas H., et al. “Targeting the hemoglobin scavenger receptor CD163 in macrophages highly increases the anti-inflammatory potency of dexamethasone.” Molecular Therapy 20.8 (2012): 1550-1558.

[0450] Gurda, Brittney L., et al. “Mapping a neutralizing epitope onto the capsid of adeno-associated virus serotype 8.” Journal of virology 86.15 (2012): 7739-7751.

[0451] Hansen, Lajla Bruntse, Soren Buus, and Claus Schafer-Nielsen. “Identification and mapping of linear antibody epitopes in human serum albumin using high-density peptide arrays.” PLOS One 8.7 (2013): e68902.

[0452] Homma, Masayuki, et al. “A Novel Fusion Protein, AChR-Fc, Ameliorates Myasthenia Gravis by Neutralizing Antiacetylcholine Receptor Antibodies and Suppressing Acetylcholine Receptor-Reactive B Cells.” Neurotherapeutics 14.1 (2017): 191-198.

[0453] Howard Jr, James F. “Myasthenia gravis: the role of complement at the neuromuscular junction.” Annals of the New York Academy of Sciences 1412.1 (2018): 113-128.

[0454] Howarth, M., & Brune, K. D. (2018). New routes and opportunities for modular construction of particulate vaccines: stick, click and glue. Frontiers in immunology, 9, 1432.

[0455] Hromic-Jahjefendic, Altijana, and Kenneth Lundstrom. “Viral vector-based melanoma gene therapy.” Biomedicines 8.3 (2020): 60.

[0456] Innao, Vanessa, et al. “Oncolytic viruses and hematological malignancies: a new class of immunotherapy drugs.” Current Oncology 28.1 (2020): 159-183.

[0457] Jansson, Liselotte, et al. “Immunotherapy With Apitopes Blocks the Immune Response to TSH Receptor in HLA-DR Transgenic Mice.” Endocrinology 159.9 (2018): 3446-3457.

[0458] Jensen, Kamilla Kjærgaard, et al. “Improved methods for predicting peptide binding affinity to MHC class II molecules.” Immunology 154.3 (2018): 394-406.

[0459] Jin, Shengye, et al. “Oncolytic viruses for triple negative breast cancer and beyond.” Biomarker Research 9 (2021): 1-16.

[0460] Jurtz, Vanessa, et al. “NetMHCpan-4.0: improved peptide-MHC class I interaction predictions integrating eluted ligand and peptide binding affinity data.” The Journal of Immunology 199.9 (2017): 3360-3368.

[0461] Kainulainen, Markus H., et al. “High-throughput quantitation of SARS-COV-2 antibodies in a single-dilution homogeneous assay.” Scientific reports 11.1 (2021): 1-9.

[0462] Kontermann, Roland E., Guy Ungerechts, and Dirk M. Nettelbeck. “Viro-antibody therapy: engineering oncolytic viruses for genetic delivery of diverse antibody-based biotherapeutics.” MAbs. Vol. 13. No. 1. Taylor & Francis, 2021.

[0463] Koşaloğlu-Yalçin, Zeynep, et al. “Predicting T cell recognition of MHC class I restricted neoepitopes.” Oncoimmunology 7.11 (2018): e1492508.

[0464] Krasnykh, Victor, et al. “Characterization of an adenovirus vector containing a heterologous peptide epitope in the HI loop of the fiber knob.” Journal of virology 72.3 (1998): 1844-1852.

[0465] Kruzik, Anita, et al. “Prevalence of anti-adeno-associated virus immune responses in international cohorts of healthy donors.” Molecular Therapy-Methods & Clinical Development 14 (2019): 126-133.

[0466] Kuklik, Juliane, et al. “Development of a Bispecific Antibody-Based Platform for Retargeting of Capsid Modified AAV Vectors.” International journal of molecular sciences 22.15 (2021): 8355.

[0467] Lawler, Sean E., et al. “Oncolytic viruses in cancer treatment: a review.” JAMA oncology 3.6 (2017): 841-849.

[0468] Lazaridis, Konstantinos, et al. “Specific removal of autoantibodies by extracorporeal immunoadsorption ameliorates experimental autoimmune myasthenia gravis.” Journal of neuroimmunology 312 (2017): 24-30.

[0469] Leung, Nicki Y H, et al. “Screening and identification of mimotopes of the major shrimp allergen tropomyosin using one-bead-one-compound peptide libraries.” Cellular & molecular immunology 14.3 (2017): 308-318.

[0470] Li, Chengwen, and R. Jude Samulski. “Engineering adeno-associated virus vectors for gene therapy.” Nature Reviews Genetics 21.4 (2020): 255-272.

[0471] Li, Peipei, Li Wang, and Li-jun Di. “Applications of protein fragment complementation assays for analyzing biomolecular interactions and biochemical networks in living cells.” Journal of proteome research 18.8 (2019): 2987-2998.

[0472] Lim, Sung In, and Inchan Kwon. “Bioconjugation of therapeutic proteins and enzymes using the expanded set of genetically encoded amino acids.” Critical reviews in biotechnology 36.5 (2016): 803-815.

[0473] Lin, Chia-Hao, et al. “Identification of a major epitope by anti-interferon-y autoantibodies in patients with mycobacterial disease.” Nature medicine 22.9 (2016): 994.

[0474] Liu, Huitao, and Honglin Luo. “Development of group B coxsackievirus as an oncolytic virus: opportunities and challenges.” Viruses 13.6 (2021): 1082.

[0475] Lorentz, Kristen M., et al. “Engineered binding to erythrocytes induces immunological tolerance to E. coli asparaginase.” Science advances 1.6 (2015): e1500112.

[0476] Lundstrom, Kenneth. “New frontiers in oncolytic viruses: optimizing and selecting for virus strains with improved efficacy.” Biologics: targets & therapy 12 (2018): 43.

[0477] Luo, Jie, et al. “Main immunogenic region structure promotes binding of conformation-dependent myasthenia gravis autoantibodies, nicotinic acetylcholine receptor conformation maturation, and agonist sensitivity.” Journal of Neuroscience 29.44 (2009): 13898-13908.

[0478] Luo, Jie, and Jon Lindstrom. “AChR-specific immunosuppressive therapy of myasthenia gravis.” Biochemical pharmacology 97.4 (2015): 609-619.

[0479] Madsen, Mette, et al. “Molecular Characterization of the Haptoglobin. Hemoglobin Receptor CD163 ligand binding properties of the scavenger receptor cysteine-rich domain region.” Journal of Biological Chemistry 279.49 (2004): 51561-51567.

[0480] Majowicz, Anna, et al. “Seroprevalence of pre-existing NABs against AAV1, 2, 5, 6 and 8 in the South African Hemophilia B patient population.” (2019): 3353-3353.

[0481] Manno, Catherine S., et al. “Successful transduction of liver in hemophilia by AAV-Factor IX and limitations imposed by the host immune response.” Nature medicine 12.3 (2006): 342-347.

[0482] Mazor, Ronit, et al. “Tolerogenic nanoparticles restore the antitumor activity of recombinant immunotoxins by mitigating immunogenicity.” Proceedings of the National Academy of Sciences 115.4 (2018): E733-E742.

[0483] Meister, Daniel, S. Maryamdokht Taimoory, and John F. Trant. “Unnatural amino acids improve affinity and modulate immunogenicity: Developing peptides to treat MHC type II autoimmune disorders.” Peptide Science 111.1 (2019): e24058.

[0484] Mietzsch, Mario, et al. “OneBac: platform for scalable and high-titer production of adeno-associated virus serotype 1-12 vectors for gene therapy.” Human gene therapy 25.3 (2014): 212-222.

[0485] Mimuro, Jun, et al. “Minimizing the inhibitory effect of neutralizing antibody for efficient gene expression in the liver with adeno-associated virus 8 vectors.” Molecular Therapy 21.2 (2013): 318-323.

[0486] Mingozzi, Federico, et al. “Overcoming preexisting humoral immunity to AAV using capsid decoys.” Science translational medicine 5.194 (2013): 194ra92-194ra92.

[0487] Mingozzi, Federico, and Katherine A. High. “Overcoming the host immune response to adeno-associated virus gene delivery vectors: the race between clearance, tolerance, neutralization, and escape.” Annual review of virology 4 (2017): 511-534.

[0488] Mok, Darren Z L, and Kuan Rong Chan. “The effects of pre-existing antibodies on live-attenuated viral vaccines.” Viruses 12.5 (2020): 520.

[0489] Monahan, Paul E., et al. “Emerging Immunogenicity and Genotoxicity Considerations of Adeno-Associated Virus Vector Gene Therapy for Hemophilia.” Journal of Clinical Medicine 10.11 (2021): 2471.

[0490] Morimoto et. al., Bioconjugate Chemistry 25 (8) (2014): 1479-1491

[0491] Moussa, Ehab M., et al. “Immunogenicity of therapeutic protein aggregates.” Journal of pharmaceutical sciences 105.2 (2016): 417-430.

[0492] Müller, Manuel M. “Post-translational modifications of protein backbones: unique functions, mechanisms, and challenges.” Biochemistry 57.2 (2017): 177-185.

[0493] Müller, Louise, et al. “Past, present and future of oncolytic reovirus.” Cancers 12.11 (2020): 3219.

[0494] Munis, Altar M., Emma M. Bentley, and Yasuhiro Takeuchi. “A tool with many applications: vesicular stomatitis virus in research and medicine.” Expert Opinion on Biological Therapy 20.10 (2020): 1187-1201.

[0495] Siang Ong, Yong, et al. “Recent advances in synthesis and identification of cyclic peptides for bioapplications.” Current topics in medicinal chemistry 17.20 (2017): 2302-2318.

[0496] Peters, Bjoern, et al. “A community resource benchmarking predictions of peptide binding to MHC-I molecules.” PLOS computational biology 2.6 (2006): e65.

[0497] Pishesha, Novalia, et al. “Engineered erythrocytes covalently linked to antigenic peptides can protect against autoimmune disease.” Proceedings of the National Academy of Sciences (2017): 201701746.

[0498] Rahman, Masmudur M., and Grant McFadden. “Oncolytic viruses: newest frontier for cancer immunotherapy.” Cancers 13.21 (2021): 5452.

[0499] Resch, Wolfgang, et al. “Protein composition of the vaccinia virus mature virion.” Virology 358.1 (2007): 233-247.

[0500] Rey et al., Clinical Immunology 96 (3) (2000): 269-279

[0501] Rice, Peter, Ian Longden, and Alan Bleasby. “EMBOSS: the European molecular biology open software suite.” Trends in genetics 16.6 (2000): 276-277.

[0502] Roberts, Diane M., et al. “Hexon-chimaeric adenovirus serotype 5 vectors circumvent pre-existing anti-vector immunity.” Nature 441.7090 (2006): 239-243.

[0503] Romanenko, Margarita, et al. “Adenovirus type 6: Subtle structural distinctions from adenovirus type 5 result in essential differences in properties and perspectives for gene therapy.” Pharmaceutics 13.10 (2021): 1641.

[0504] Ronzitti, Giuseppe, David-Alexandre Gross, and Federico Mingozzi. “Human immune responses to adeno-associated virus (AAV) vectors.” Frontiers in immunology 11 (2020): 670.

[0505] Ruff, Robert L., and Robert P. Lisak. “Nature and action of antibodies in myasthenia gravis.” Neurologic clinics 36.2 (2018): 275-291.

[0506] Rummler, Silke, et al. “Current techniques for ABO-incompatible living donor liver transplantation.” World journal of transplantation 6.3 (2016): 548.

[0507] Runcie, Karie, et al. “Bi-specific and tri-specific antibodies—the next big thing in solid tumor therapeutics.” Molecular Medicine 24.1 (2018): 50.

[0508] Ryan, Brent J., Ahuva Nissim, and Paul G. Winyard. “Oxidative post-translational modifications and their involvement in the pathogenesis of autoimmune diseases.” Redox biology 2 (2014): 715-724.

[0509] Salganik, Max, Matthew L. Hirsch, and Richard Jude Samulski. “Adeno-associated virus as a mammalian DNA vector.” Mobile DNA III (2015): 827-849.

[0510] Shanmugam, Arulkumaran, et al. “Identification of PSA peptide mimotopes using phage display peptide library.” Peptides 32.6 (2011): 1097-1102.

[0511] Skytthe, Maria K., Jonas Heilskov Graversen, and Søren K. Moestrup. “Targeting of CD163+Macrophages in Inflammatory and Malignant Diseases.” International Journal of Molecular Sciences 21.15 (2020): 5497.

[0512] Sonntag, F., et al. “The assembly-activating protein promotes capsid assembly of different adeno-associated virus serotypes.” Journal of virology 85.23 (2011): 12686-12697.

[0513] Sørensen, Karen Kristine, et al. “Liver sinusoidal endothelial cells.” Comprehensive Physiology 5.4 (2011): 1751-1774.

[0514] Spiess, Christoph, Qianting Zhai, and Paul J. Carter. “Alternative molecular formats and therapeutic applications for bispecific antibodies.” Molecular immunology 67.2 (2015): 95-106.

[0515] Sunasee, Rajesh, and Ravin Narain. “Covalent and noncovalent bioconjugation strategies.” Chemistry of Bioconjugates: Synthesis, Characterization, and Biomedical Applications (2014): 1-75.

[0516] Taddeo, Adriano, et al. “Selection and depletion of plasma cells based on the specificity of the secreted antibody.” European journal of immunology 45.1 (2015): 317-319.

[0517] Teschner, Sven, et al. “ABO-incompatible kidney transplantation using regenerative selective immunoglobulin adsorption.” Journal of clinical apheresis 27.2 (2012): 51-60.

[0518] Tetala, Kishore K R, et al. “Selective depletion of neuropathy-related antibodies from human serum by monolithic affinity columns containing ganglioside mimics.” Journal of medicinal chemistry 54.10 (2011): 3500-3505.

[0519] Tian, Xingui, et al. “Broadly neutralizing monoclonal antibodies against human adenovirus types 55, 14p, 7, and 11 generated with recombinant type 11 fiber knob.” Emerging microbes & infections 7.1 (2018): 1-12.

[0520] Torres-Domínguez, Lino E., and Grant McFadden. “Poxvirus oncolytic virotherapy.” Expert opinion on biological therapy 19.6 (2019): 561-573.

[0521] Tseng, Yu-Shan, and Mavis Agbandje-McKenna. “Mapping the AAV capsid host antibody response toward the development of second generation gene delivery vectors.” Frontiers in immunology 5 (2014): 9.

[0522] Thuenemann, Eva C., et al. “Bluetongue virus particles as nanoreactors for enzyme delivery and cancer therapy.” Molecular pharmaceutics 18.3 (2021): 1150-1156.

[0523] Varghese, Robin, et al. “Postentry neutralization of adenovirus type 5 by an antihexon antibody.” Journal of virology 78.22 (2004): 12320-12332.

[0524] Verdera, Helena Costa, Klaudia Kuranda, and Federico Mingozzi. “AAV vector immunogenicity in humans: a long journey to successful gene transfer.” Molecular Therapy 28.3 (2020): 723-746.

[0525] Vincent, Angela, et al. “Serological and experimental studies in different forms of myasthenia gravis.” Annals of the New York Academy of Sciences 1413.1 (2018): 143-153.

[0526] Wallukat, Gerd, et al. “Patients with preeclampsia develop agonistic autoantibodies against the angiotensin AT 1 receptor.” The Journal of clinical investigation 103.7 (1999): 945-952.

[0527] Wang, Rong, et al. “A Murine Monoclonal Antibody With Potent Neutralization Ability Against Human Adenovirus 7.” Frontiers in cellular and infection microbiology 9 (2019): 417.

[0528] Yang, Chen, et al. “Oncolytic viruses as a promising therapeutic strategy for hematological malignancies.” Biomedicine & Pharmacotherapy 139 (2021): 111573.

[0529] Zeng, Jiayi, et al. “Oncolytic viro-immunotherapy: an emerging option in the treatment of gliomas.” Frontiers in immunology 12 (2021): 721830.

[0530] Zhang, Wei-Wei, et al. “The first approved gene therapy product for cancer Ad-p53 (Gendicine): 12 years in the clinic.” Human gene therapy 29.2 (2018): 160-179.

[0531] Zhou, Cissy C., et al. “Angiotensin receptor agonistic autoantibodies induce pre-eclampsia in pregnant mice.” Nature medicine 14.8 (2008): 855.

[0532] Zhu, Feng-Cai, et al. “Safety, tolerability, and immunogenicity of a recombinant adenovirus type-5 vectored COVID-19 vaccine: a dose-escalation, open-label, non-randomised, first-in-human trial.” The Lancet 395.10240 (2020): 1845-1854.

The application's sequence listing, which the Patent Office published only in electronic form, follows.

SEQUENCE LISTING (2229 sequences)

SEQ ID NO: 1 - protein, 116 aa, synthetic construct
  REGION 1..116: note = heavy chain variable (VH) region
DVQLQESGPGLVKPSQSLSLTCTVTGYSITSDYAWNWIRQFPGNKLEWMGYITYSGITNYNPSLKSQISITRDTSKNQFFLQLNSVTTEDTATYYCVSGTYYFDYWGQGTTLTVSS

SEQ ID NO: 2 - protein, 109 aa, synthetic construct
  REGION 1..109: note = light chain variable (VL) region
SVVMTQTPKSLLISIGDRVTITCKASQSVSSDVAWFQQKPGQSPKPLIYYASNRYTGVPDRFTGSGYGTDFTFTISSVQAEDLAVYFCGQDYTSPRTFGGGTKLEIKRA

SEQ ID NO: 3 - protein, 25 aa, synthetic construct
  REGION 1..25: note = peptide
CSGRVEVKVQEEWGTVCNNGWSMEA

SEQ ID NO: 4 - protein, 11 aa, synthetic construct
  REGION 1..11: note = peptide
GRVEVKVQEEW

SEQ ID NO: 5 - protein, 10 aa, synthetic construct
  REGION 1..10: note = peptide
WGTVCNNGWS

SEQ ID NO: 6 - protein, 9 aa, synthetic construct
  REGION 1..9: note = peptide
WGTVCNNGW

SEQ ID NO: 7 - protein, 13 aa, synthetic construct
  REGION 1..13: note = peptide
EWGTVCNNGWSME

SEQ ID NO: 8 - protein, 13 aa, synthetic construct
  REGION 1..13: note = peptide
QEEWGTVCNNGWS

SEQ ID NO: 9 - protein, 13 aa, synthetic construct
  REGION 1..13: note = peptide
WGTVCNNGWSMEA

SEQ ID NO: 10 - protein, 13 aa, synthetic construct
  REGION 1..13: note = peptide
EEWGTVCNNGWSM

SEQ ID NO: 11 - protein, 13 aa, synthetic construct
  REGION 1..13: note = peptide
VQEEWGTVCNNGW

SEQ ID NO: 12 - protein, 10 aa, synthetic construct
  REGION 1..10: note = peptide
EWGTVCNNGW

SEQ ID NO: 13 - protein, 21 aa, synthetic construct
  REGION 1..21: note = peptide
DHVSCRGNESALWDCKHDGWG

SEQ ID NO: 14 - protein, 5 aa, synthetic construct
  REGION 1..5: note = peptide
ESALW

SEQ ID NO: 15 - protein, 7 aa, synthetic construct
  REGION 1..7: note = peptide
ESALWDC

SEQ ID NO: 16 - protein, 10 aa, synthetic construct
  REGION 1..10: note = peptide
RGNESALWDC

SEQ ID NO: 17 - protein, 10 aa, synthetic construct
  REGION 1..10: note = peptide
SCRGNESALW

SEQ ID NO: 18 - protein, 13 aa, synthetic construct
  REGION 1..13: note = peptide
VSCRGNESALWDC

SEQ ID NO: 19 - protein, 10 aa, synthetic construct
  REGION 1..10: note = peptide
ALWDCKHDGW

SEQ ID NO: 20 - protein, 13 aa, synthetic construct
  REGION 1..13: note = peptide
DHVSCRGNESALW

SEQ ID NO: 21 - protein, 10 aa, synthetic construct
  REGION 1..10: note = peptide
CRGNESALWD

SEQ ID NO: 22 - protein, 13 aa, synthetic construct
  REGION 1..13: note = peptide
NESALWDCKHDGW

SEQ ID NO: 23 - protein, 13 aa, synthetic construct
  REGION 1..13: note = peptide
ESALWDCKHDGWG

SEQ ID NO: 24 - protein, 20 aa, synthetic construct
  REGION 1..20: note = peptide
SSLGGTDKELRLVDGENKCS

SEQ ID NO: 25 - protein, 11 aa, synthetic construct
  REGION 1..11: note = peptide
SSLGGTDKELR

SEQ ID NO: 26 - protein, 5 aa, synthetic construct
  REGION 1..5: note = peptide
SSLGG

SEQ ID NO: 27 - protein, 10 aa, synthetic construct
  REGION 1..10: note = peptide
SSLGGTDKEL

SEQ ID NO: 28 - protein, 9 aa, synthetic construct
  REGION 1..9: note = peptide
SSLGGTDKE

SEQ ID NO: 29 - protein, 8 aa, synthetic construct
  REGION 1..8: note = peptide
SSLGGTDK

SEQ ID NO: 30 - protein, 7 aa, synthetic construct
  REGION 1..7: note = peptide
SSLGGTD

SEQ ID NO: 31 - protein, 6 aa, synthetic construct
  REGION 1..6: note = peptide
SSLGGT

SEQ ID NO: 32 - protein, 14 aa, synthetic construct
  REGION 1..14: note = peptide
ETGPPTVPFLTPPF

SEQ ID NO: 33 - protein, 13 aa, synthetic construct
  REGION 1..13: note = peptide
HDSKLSIATQGPL

SEQ ID NO: 34 - protein, 22 aa, synthetic construct
  REGION 1..22: note = peptide
LNLRLGQGPLFINSAHNLDINY

SEQ ID NO: 35 - protein, 20 aa, synthetic construct
  REGION 1..20: note = peptide
VDPMDEPTLLYVLFEVFDVV

SEQ ID NO: 36 - protein, 18 aa, synthetic construct
  REGION 1..18: note = peptide
MKRARPSEDTFNPVYPYD

SEQ ID NO: 37 - protein, 15 aa, synthetic construct
  REGION 1..15: note = peptide
ISGTVQSAHLIIRFD

SEQ ID NO: 38 - protein, 25 aa, synthetic construct
  REGION 1..25: note = peptide
LGQGPLFINSAHNLDINYNKGLYLF

SEQ ID NO: 39 - protein, 22 aa, synthetic construct
  REGION 1..22: note = peptide
SYPFDAQNQLNLRLGQGPLFIN

SEQ ID NO: 40 - protein, 23 aa, synthetic construct
  REGION 1..23: note = peptide
GDTTPSAYSMSFSWDWSGHNYIN

SEQ ID NO: 41 - protein, 17 aa, synthetic construct
  REGION 1..17: note = peptide
VLLNNSFLDPEYWNFRN

SEQ ID NO: 42 - protein, 19 aa, synthetic construct
  REGION 1..19: note = peptide
HNYINEIFATSSYTFSYIA

SEQ ID NO: 43 - protein, 32 aa, synthetic construct
  REGION 1..32: note = peptide
DEAATALEINLEEEDDDNEDEVDEQAEQQKTH

SEQ ID NO: 44 - protein, 20 aa, synthetic construct
  REGION 1..20: note = peptide
INLEEEDDDNEDEVDEQAEQ

SEQ ID NO: 45 - protein, 18 aa, synthetic construct
  REGION 1..18: note = peptide
DNEDEVDEQAEQQKTHVF

SEQ ID NO: 46 - protein, 15 aa, synthetic construct
  REGION 1..15: note = peptide
EWDEAATALEINLEE

SEQ ID NO: 47 - protein, 23 aa, synthetic construct
  REGION 1..23: note = peptide
PKVVLYSEDVDIETPDTHISYMP

SEQ ID NO: 48 - protein, 17 aa, synthetic construct
  REGION 1..17: note = peptide
YIPESYKDRMYSFFRNF

SEQ ID NO: 49 - protein, 13 aa, synthetic construct
  REGION 1..13: note = peptide
DSIGDRTRYFSMW

SEQ ID NO: 50 - protein, 13 aa, synthetic construct
  REGION 1..13: note = peptide
SYKDRMYSFFRNF

SEQ ID NO: 51 - protein, 17 aa, synthetic construct
  REGION 1..17: note = peptide
FLVQMLANYNIGYQGFY

SEQ ID NO: 52 - protein, 17 aa, synthetic construct
  REGION 1..17: note = peptide
WQNRDVYLQGPIWAKIP

SEQ ID NO: 53 - protein, 21 aa, synthetic construct
  REGION 1..21: note = peptide
DNTYFGYSTPWGYFDFNRFHC

SEQ ID NO: 54 - protein, 14 aa, synthetic construct
  REGION 1..14: note = peptide
MANQAKNWLPGPCY

SEQ ID NO: 55 - protein, 17 aa, synthetic construct
  REGION 1..17: note = peptide
LPYVLGSAHQGCLPPFP

SEQ ID NO: 56 - protein, 17 aa, synthetic construct
  REGION 1..17: note = peptide
NGSQAVGRSSFYCLEYF

SEQ ID NO: 57 - protein, 10 aa, synthetic construct
  REGION 1..10: note = peptide
PLIDQYLYYL

SEQ ID NO: 58 - protein, 13 aa, synthetic construct
  REGION 1..13: note = peptide
EERFFPSNGILIF

SEQ ID NO: 59 - protein, 13 aa, synthetic construct
  REGION 1..13: note = peptide
ADGVGSSSGNWHC

SEQ ID NO: 60 - protein, 10 aa, synthetic construct
  REGION 1..10: note = peptide
GPPTVPFLTP

SEQ ID NO: 61 - protein, 13 aa, synthetic construct
  REGION 1..13: note = peptide
ETGPPTVPFLTPP

SEQ ID NO: 62 - protein, 10 aa, synthetic construct
  REGION 1..10: note = peptide
TGPPTVPFLT

SEQ ID NO: 63 - protein, 10 aa, synthetic construct
  REGION 1..10: note = peptide
PTVPFLTPPF

SEQ ID NO: 64 - protein, 13 aa, synthetic construct
  REGION 1..13: note = peptide
HDSKLSIATQGPL

SEQ ID NO: 65 - protein, 7 aa, synthetic construct
  REGION 1..7: note = peptide
SIATQGP

SEQ ID NO: 66 - protein, 10 aa, synthetic construct
  REGION 1..10: note = peptide
NLRLGQGPLF

SEQ ID NO: 67 - protein, 10 aa, synthetic construct
  REGION 1..10: note = peptide
QGPLFINSAH

SEQ ID NO: 68 - protein, 11 aa, synthetic construct
  REGION 1..11: note = peptide
PLFINSAHNLD

SEQ ID NO: 69 - protein, 7 aa, synthetic construct
  REGION 1..7: note = peptide
LGQGPLF

SEQ ID NO: 70 - protein, 10 aa, synthetic construct
  REGION 1..10: note = peptide
LNLRLGQGPL

SEQ ID NO: 71 - protein, 7 aa, synthetic construct
  REGION 1..7: note = peptide
GQGPLFI

SEQ ID NO: 72 - protein, 13 aa, synthetic construct
  REGION 1..13: note = peptide
NLRLGQGPLFINS

SEQ ID NO: 73 - protein, 13 aa, synthetic construct
  REGION 1..13: note = peptide
LFINSAHNLDINY

SEQ ID NO: 74 - protein, 10 aa, synthetic construct
  REGION 1..10: note = peptide
FINSAHNLDI

SEQ ID NO: 75 - protein, 10 aa, synthetic construct
  REGION 1..10: note = peptide
LRLGQGPLFI

SEQ ID NO: 76 - protein, 10 aa, synthetic construct
  REGION 1..10: note = peptide
GPLFINSAHN

SEQ ID NO: 77 - protein, 13 aa, synthetic construct
  REGION 1..13: note = peptide
DEPTLLYVLFEVF

SEQ ID NO: 78 - protein, 10 aa, synthetic construct
  REGION 1..10: note = peptide
TLLYVLFEVF

SEQ ID NO: 79 - protein, 10 aa, synthetic construct
  REGION 1..10: note = peptide
DEPTLLYVLF

SEQ ID NO: 80 - protein, 13 aa, synthetic construct
  REGION 1..13: note = peptide
TLLYVLFEVFDVV

SEQ ID NO: 81 - protein, 7 aa, synthetic construct
  REGION 1..7: note = peptide
TLLYVLF

SEQ ID NO: 82 - protein, 13 aa, synthetic construct
  REGION 1..13: note = peptide
MDEPTLLYVLFEV

SEQ ID NO: 83 - protein, 10 aa, synthetic construct
  REGION 1..10: note = peptide
EPTLLYVLFE

SEQ ID NO: 84 - protein, 13 aa, synthetic construct
  REGION 1..13: note = peptide
DPMDEPTLLYVLF

SEQ ID NO: 85 - protein, 10 aa, synthetic construct
  REGION 1..10: note = peptide
LLYVLFEVFD

SEQ ID NO: 86 - protein, 10 aa, synthetic construct
  REGION 1..10: note = peptide
YVLFEVFDVV

SEQ ID NO: 87 - protein, 10 aa, synthetic construct
  REGION 1..10: note = peptide
PTLLYVLFEV

SEQ ID NO: 88 - protein, 13 aa, synthetic construct
  REGION 1..13: note = peptide
PTLLYVLFEVFDV

SEQ ID NO: 89 - protein, 10 aa, synthetic construct
  REGION 1..10: note = peptide
LYVLFEVFDV

SEQ ID NO: 90 - protein, 13 aa, synthetic construct
  REGION 1..13: note = peptide
EPTLLYVLFEVFD

SEQ ID NO: 91 - protein, 7 aa, synthetic construct
  REGION 1..7: note = peptide
LYVLFEV

SEQ ID NO: 92 - protein, 13 aa, synthetic construct
  REGION 1..13: note = peptide
PMDEPTLLYVLFE

SEQ ID NO: 93 - protein, 7 aa, synthetic construct
  REGION 1..7: note = peptide
LLYVLFE

SEQ ID NO: 94 - protein, 13 aa, synthetic construct
  REGION 1..13: note = peptide
VDPMDEPTLLYVL

SEQ ID NO: 95 - protein, 7 aa, synthetic construct
  REGION 1..7: note = peptide
YVLFEVF

SEQ ID NO: 96 - protein, 7 aa, synthetic construct
  REGION 1..7: note = peptide
PTLLYVL

SEQ ID NO: 97 - protein, 11 aa, synthetic construct
  REGION 1..11: note = peptide
MKRARPSEDTF

SEQ ID NO: 98 - protein, 10 aa, synthetic construct
  REGION 1..10: note = peptide
KRARPSEDTF

SEQ ID NO: 99 - protein, 10 aa, synthetic construct
  REGION 1..10: note = peptide
MKRARPSEDT

SEQ ID NO: 100 - protein, 12 aa, synthetic construct
  REGION 1..12: note = peptide
MKRARPSEDTFN

SEQ ID NO: 101 - protein, 10 aa, synthetic construct
  REGION 1..10: note = peptide
ARPSEDTFNP

SEQ ID NO: 102 - protein, 10 aa, synthetic construct
  REGION 1..10: note = peptide
RARPSEDTFN

SEQ ID NO: 103 - protein, 7 aa, synthetic construct
  REGION 1..7: note = peptide
RPSEDTF

SEQ ID NO: 104 - protein, 13 aa, synthetic construct
  REGION 1..13: note = peptide
MKRARPSEDTFNP

SEQ ID NO: 105 - protein, 13 aa, synthetic construct
  REGION 1..13: note = peptide
RARPSEDTFNPVY

SEQ ID NO: 106 - protein, 7 aa, synthetic construct
  REGION 1..7: note = peptide
ARPSEDT

SEQ ID NO: 107 - protein, 10 aa, synthetic construct
  REGION 1..10: note = peptide
EDTFNPVYPY

SEQ ID NO: 108 - protein, 13 aa, synthetic construct
  REGION 1..13: note = peptide
RPSEDTFNPVYPY

SEQ ID NO: 109 - protein, 13 aa, synthetic construct
  REGION 1..13: note = peptide
KRARPSEDTFNPV

SEQ ID NO: 110 - protein, 7 aa, synthetic construct
  REGION 1..7: note = peptide
DTFNPVY

SEQ ID NO: 111 - protein, 10 aa, synthetic construct
  REGION 1..10: note = peptide
RPSEDTFNPV

SEQ ID NO: 112 - protein, 10 aa, synthetic construct
  REGION 1..10: note = peptide
PSEDTFNPVY

SEQ ID NO: 113 - protein, 10 aa, synthetic construct
  REGION 1..10: note = peptide
DTFNPVYPYD

SEQ ID NO: 114 - protein, 10 aa, synthetic construct
  REGION 1..10: note = peptide
VQSAHLIIRF

SEQ ID NO: 115 - protein, 7 aa, synthetic construct
  REGION 1..7: note = peptide
AHLIIRF

SEQ ID NO: 116 - protein, 13 aa, synthetic construct
  REGION 1..13: note = peptide
SGTVQSAHLIIRF

SEQ ID NO: 117 - protein, 10 aa, synthetic construct
  REGION 1..10: note = peptide
TVQSAHLIIR

SEQ ID NO: 118 - protein, 7 aa, synthetic construct
  REGION 1..7: note = peptide
HLIIRFD

SEQ ID NO: 119 - protein, 7 aa, synthetic construct
  REGION 1..7: note = peptide
SAHLIIR

SEQ ID NO: 120 - protein, 10 aa, synthetic construct
  REGION 1..10: note = peptide
QSAHLIIRFD

SEQ ID NO: 121 - protein, 13 aa, synthetic construct
  REGION 1..13: note = peptide
ISGTVQSAHLIIR

SEQ ID NO: 122 - protein, 10 aa, synthetic construct
  REGION 1..10: note = peptide
GTVQSAHLII

SEQ ID NO: 123 - protein, 13 aa, synthetic construct
  REGION 1..13: note = peptide
GTVQSAHLIIRFD

SEQ ID NO: 124 - protein, 7 aa, synthetic construct
  REGION 1..7: note = peptide
QSAHLII

SEQ ID NO: 125 - protein, 7 aa, synthetic construct
  REGION 1..7: note = peptide
HNLDINY

SEQ ID NO: 126 - protein, 13 aa, synthetic construct
  REGION 1..13: note = peptide
LFINSAHNLDINY

SEQ ID NO: 127 - protein, 13 aa, synthetic construct
  REGION 1..13: note = peptide
NLDINYNKGLYLF

SEQ ID NO: 128 - protein, 6 aa, synthetic construct
  REGION 1..6: note = peptide
FVSPNG

SEQ ID NO: 129 - protein, 7 aa, synthetic construct
  REGION 1..7: note = peptide
NYINEIF

SEQ ID NO: 130 - protein, 7 aa, synthetic construct
  REGION 1..7: note = peptide
NKGLYLF

SEQ ID NO: 131 - protein, 10 aa, synthetic construct
  REGION 1..10: note = peptide
INYNKGLYLF

SEQ ID NO: 132 - protein, 10 aa, synthetic construct
  REGION 1..10: note = peptide
NSAHNLDINY

SEQ ID NO: 133 - protein, 13 aa, synthetic construct
  REGION 1..13: note = peptide
WDWSGHNYINEIF

SEQ ID NO: 134 - protein, 10 aa, synthetic construct
  REGION 1..10: note = peptide
SGHNYINEIF

SEQ ID NO: 135 - protein, 7 aa, synthetic construct
  REGION 1..7: note = peptide
LGTGLSF

SEQ ID NO: 136 - protein, 7 aa, synthetic construct
  REGION 1..7: note = peptide
PFLTPPF

SEQ ID NO: 137 - protein, 7 aa, synthetic construct
  REGION 1..7: note = peptide
LGQGPLF

SEQ ID NO: 138 - protein, 10 aa, synthetic construct
  REGION 1..10: note = peptide
NLRLGQGPLF

SEQ ID NO: 139 - protein, 13 aa, synthetic construct
  REGION 1..13: note = peptide
NQLNLRLGQGPLF

SEQ ID NO: 140 - protein, 7 aa, synthetic construct
  REGION 1..7: note = peptide
GQGPLFI

SEQ ID NO: 141 - protein, 13 aa, synthetic construct
  REGION 1..13: note = peptide
QLNLRLGQGPLFI

SEQ ID NO: 142 - protein, 13 aa, synthetic construct
  REGION 1..13: note = peptide
SYPFDAQNQLNLR

SEQ ID NO: 143 - protein, 13 aa, synthetic construct
  REGION 1..13: note = peptide
YPFDAQNQLNLRL

SEQ ID NO: 144 - protein, 10 aa, synthetic construct
  REGION 1..10: note = peptide
LRLGQGPLFI

SEQ ID NO: 145 - protein, 7 aa, synthetic construct
  REGION 1..7: note = peptide
NQLNLRL

SEQ ID NO: 146 - protein, 10 aa, synthetic construct
  REGION 1..10: note = peptide
FDAQNQLNLR

SEQ ID NO: 147 - protein, 7 aa, synthetic construct
  REGION 1..7: note = peptide
QNQLNLR

SEQ ID NO: 148 - protein, 7 aa, synthetic construct
  REGION 1..7: note = peptide
QGPLFIN

SEQ ID NO: 149 - protein, 13 aa, synthetic construct
  REGION 1..13: note = peptide
PFDAQNQLNLRLG

SEQ ID NO: 150 - protein, 10 aa, synthetic construct
  REGION 1..10: note = peptide
DAQNQLNLRL

SEQ ID NO: 151 - protein, 10 aa, synthetic construct
  REGION 1..10: note = peptide
RLGQGPLFIN

SEQ ID NO: 152 - protein, 7 aa, synthetic construct
  REGION 1..7: note = peptide
QLNLRLG

SEQ ID NO: 153 - protein, 13 aa, synthetic construct
  REGION 1..13: note = peptide
FDAQNQLNLRLGQ

SEQ ID NO: 154 - protein, 13 aa, synthetic construct
  REGION 1..13: note = peptide
LNLRLGQGPLFIN

SEQ ID NO: 155 - protein, 10 aa, synthetic construct
  REGION 1..10: note = peptide
AQNQLNLRLG

SEQ ID NO: 156 - protein, 7 aa, synthetic construct
  REGION 1..7: note = peptide
AQNQLNL

SEQ ID NO: 157 - protein, 7 aa, synthetic construct
  REGION 1..7: note = peptide
LNLRLGQ

SEQ ID NO: 158 - protein, 10 aa, synthetic construct
  REGION 1..10: note = peptide
SYPFDAQNQL

SEQ ID NO: 159 - protein, 10 aa, synthetic construct
  REGION 1..10: note = peptide
PFDAQNQLNL

SEQ ID NO: 160 - protein, 7 aa, synthetic construct
  REGION 1..7: note = peptide
YSMSFSW

SEQ ID NO: 161 - protein, 13 aa, synthetic construct
  REGION 1..13: note = peptide
TPSAYSMSFSWDW

SEQ ID NO: 162 - protein, 7 aa, synthetic construct
  REGION 1..7: note = peptide
MSFSWDW

SEQ ID NO: 163 - protein, 10 aa, synthetic construct
  REGION 1..10: note = peptide
PSAYSMSFSW

SEQ ID NO: 164 - protein, 13 aa, synthetic construct
  REGION 1..13: note = peptide
DTTPSAYSMSFSW

SEQ ID NO: 165 - protein, 10 aa, synthetic construct
  REGION 1..10: note = peptide
TTPSAYSMSF

SEQ ID NO: 166 - protein, 10 aa, synthetic construct
  REGION 1..10: note = peptide
YSMSFSWDWS

SEQ ID NO: 167 - protein, 13 aa, synthetic construct
  REGION 1..13: note = peptide
TGDTTPSAYSMSF

SEQ ID NO: 168 - protein, 10 aa, synthetic construct
  REGION 1..10: note = peptide
FSWDWSGHNY

SEQ ID NO: 169 - protein, 7 aa, synthetic construct
  REGION 1..7: note = peptide
SFSWDWS

SEQ ID NO: 170 - protein, 7 aa, synthetic construct
  REGION 1..7: note = peptide
SAYSMSF

SEQ ID NO: 171 - protein, 10 aa, synthetic construct
  REGION 1..10: note = peptide
SFSWDWSGHN

SEQ ID NO: 172 - protein, 10 aa, synthetic construct
  REGION 1..10: note = peptide
SAYSMSFSWD

SEQ ID NO: 173 - protein, 7 aa, synthetic construct
  REGION 1..7: note = peptide
SMSFSWD

SEQ ID NO: 174 - protein, 10 aa, synthetic construct
  REGION 1..10: note = peptide
SWDWSGHNYI

SEQ ID NO: 175 - protein, 7 aa, synthetic construct
  REGION 1..7: note = peptide
AYSMSFS

SEQ ID NO: 176 - protein, 13 aa, synthetic construct
  REGION 1..13: note = peptide
SMSFSWDWSGHNY

SEQ ID NO: 177 - protein, 7 aa, synthetic construct
  REGION 1..7: note = peptide
FSWDWSG

SEQ ID NO: 178 - protein, 7 aa, synthetic construct
  REGION 1..7: note = peptide
SWDWSGH

SEQ ID NO: 179 - protein, 10 aa, synthetic construct
  REGION 1..10: note = peptide
FLDPEYWNFR

SEQ ID NO: 180 - protein, 10 aa, synthetic construct
  REGION 1..10: note = peptide
SFLDPEYWNF

SEQ ID NO: 181 - protein, 7 aa, synthetic construct
  REGION 1..7: note = peptide
PEYWNFR

SEQ ID NO: 182 - protein, 13 aa, synthetic construct
  REGION 1..13: note = peptide
LNNSFLDPEYWNF

SEQ ID NO: 183 - protein, 13 aa, synthetic construct
  REGION 1..13: note = peptide
NNSFLDPEYWNFR

SEQ ID NO: 184 - protein, 7 aa, synthetic construct
  REGION 1..7: note = peptide
FLDPEYW

SEQ ID NO: 185 - protein, 7 aa, synthetic construct
  REGION 1..7: note = peptide
DPEYWNF

SEQ ID NO: 186 - protein, 10 aa, synthetic construct
  REGION 1..10: note = peptide
NNSFLDPEYW

SEQ ID NO: 187 - protein, 13 aa, synthetic construct
  REGION 1..13: note = peptide
VLLNNSFLDPEYW

SEQ ID NO: 188 - protein, 7 aa, synthetic construct
  REGION 1..7: note = peptide
EYWNFRN

SEQ ID NO: 189 - protein, 10 aa, synthetic construct
  REGION 1..10: note = peptide
LNNSFLDPEY

SEQ ID NO: 190 - protein, 10 aa, synthetic construct
  REGION 1..10: note = peptide
LDPEYWNFRN

SEQ ID NO: 191 - protein, 7 aa, synthetic construct
  REGION 1..7: note = peptide
LNNSFLD

SEQ ID NO: 192 - protein, 10 aa, synthetic construct
  REGION 1..10: note = peptide
NSFLDPEYWN

SEQ ID NO: 193 - protein, 7 aa, synthetic construct
  REGION 1..7: note = peptide
SSYTFSY

SEQ ID NO: 194 - protein, 10 aa, synthetic construct
  REGION 1..10: note = peptide
FATSSYTFSY

SEQ ID NO: 195 - protein, 13 aa, synthetic construct
  REGION 1..13: note = peptide
YINEIFATSSYTF

SEQ ID NO: 196 - protein, 7 aa, synthetic construct
  REGION 1..7: note = peptide
SYTFSYI

SEQ ID NO: 197 - protein, 7 aa, synthetic construct
  REGION 1..7: note = peptide
ATSSYTF

SEQ ID NO: 198 - protein, 10 aa, synthetic construct
  REGION 1..10: note = peptide
EIFATSSYTF

SEQ ID NO: 199 - protein, 13 aa, synthetic construct
  REGION 1..13: note = peptide
NEIFATSSYTFSY

SEQ ID NO: 200 - protein, 10 aa, synthetic construct
  REGION 1..10: note = peptide
ATSSYTFSYI

SEQ ID NO: 201 - protein, 13 aa, synthetic construct
  REGION 1..13: note = peptide
HNYINEIFATSSY

SEQ ID NO: 202 - protein, 7 aa, synthetic construct
  REGION 1..7: note = peptide
IFATSSY

SEQ ID NO: 203 - protein, 10 aa, synthetic construct
  REGION 1..10: note = peptide
INEIFATSSY

SEQ ID NO: 204 - protein, 13 aa, synthetic construct
  REGION 1..13: note = peptide
NYINEIFATSSYT

SEQ ID NO: 205 - protein, 7 aa, synthetic construct
  REGION 1..7: note = peptide
YINEIFA

SEQ ID NO: 206 - protein, 7 aa, synthetic construct
  REGION 1..7: note = peptide
YTFSYIA

SEQ ID NO: 207 - protein, 13 aa, synthetic construct
  REGION 1..13: note = peptide
EIFATSSYTFSYI

SEQ ID NO: 208 - protein, 13 aa, synthetic construct
  REGION 1..13: note = peptide
ALEINLEEEDDDN

SEQ ID NO: 209 - protein, 13 aa, synthetic construct
  REGION 1..13: note = peptide
ATALEINLEEEDD

SEQ ID NO: 210 - protein, 13 aa, synthetic construct
  REGION 1..13: note = peptide
EAATALEINLEEE

SEQ ID NO: 211 - protein, 7 aa, synthetic construct
  REGION 1..7: note = peptide
LEINLEE

SEQ ID NO: 212 - protein, 13 aa, synthetic construct
  REGION 1..13: note = peptide
TALEINLEEEDDD

SEQ ID NO: 213 - protein, 7 aa, synthetic construct
  REGION 1..7: note = peptide
EINLEEE

SEQ ID NO: 214 - protein, 10 aa, synthetic construct
  REGION 1..10: note = peptide
ALEINLEEED

SEQ ID NO: 215 - protein, 10 aa, synthetic construct
  REGION 1..10: note = peptide
LEINLEEEDD

SEQ ID NO: 216 - protein, 10 aa, synthetic construct
  REGION 1..10: note = peptide
TALEINLEEE

SEQ ID NO: 217 - protein, 13 aa, synthetic construct
  REGION 1..13: note = peptide
DEAATALEINLEE

SEQ ID NO: 218 - protein, 13 aa, synthetic construct
  REGION 1..13: note = peptide
LEINLEEEDDDNE

SEQ ID NO: 219 - protein, 13 aa, synthetic construct
  REGION 1..13: note = peptide
AATALEINLEEED

SEQ ID NO: 220 - protein, 10 aa, synthetic construct
  REGION 1..10: note = peptide
EINLEEEDDD

SEQ ID NO: 221 - protein, 10 aa, synthetic construct
  REGION 1..10: note = peptide
ATALEINLEE

SEQ ID NO: 222 - protein, 10 aa, synthetic construct
  REGION 1..10: note = peptide
INLEEEDDDN

SEQ ID NO: 223 - protein, 10 aa, synthetic construct
  REGION 1..10: note = peptide
NLEEEDDDNE

SEQ ID NO: 224 - protein, 7 aa, synthetic construct
  REGION 1..7: note = peptide
DEVDEQA

SEQ ID NO: 225 - protein, 13 aa, synthetic construct
  REGION 1..13: note = peptide
EDDDNEDEVDEQA

SEQ ID NO: 226 - protein, 13 aa, synthetic construct
  REGION 1..13: note = peptide
DDNEDEVDEQAEQ

SEQ ID NO: 227 - protein, 7 aa, synthetic construct
  REGION 1..7: note = peptide
EVDEQAE

SEQ ID NO: 228 - protein, 10 aa, synthetic construct
  REGION 1..10: note = peptide
DNEDEVDEQA

SEQ ID NO: 229 - protein, 7 aa, synthetic construct
  REGION 1..7: note = peptide
VDEQAEQ

SEQ ID NO: 230 - protein, 13 aa, synthetic construct
  REGION 1..13: note = peptide
EDEVDEQAEQQKT

SEQ ID NO: 231 - protein, 10 aa, synthetic construct
  REGION 1..10: note = peptide
EDEVDEQAEQ

SEQ ID NO: 232 - protein, 13 aa, synthetic construct
  REGION 1..13: note = peptide
DEVDEQAEQQKTH

SEQ ID NO: 233 - protein, 13 aa, synthetic construct
  REGION 1..13: note = peptide
NEDEVDEQAEQQK

SEQ ID NO: 234 - protein, 10 aa, synthetic construct
  REGION 1..10: note = peptide
DEVDEQAEQQ

SEQ ID NO: 235 - protein, 13 aa, synthetic construct
  REGION 1..13: note = peptide
EINLEEEDDDNED

SEQ ID NO: 236 - protein, 13 aa, synthetic construct
  REGION 1..13: note = peptide
NLEEEDDDNEDEV

SEQ ID NO: 237 - protein, 7 aa, synthetic construct
  REGION 1..7: note = peptide
INLEEED

SEQ ID NO: 238 - protein, 10 aa, synthetic construct
  REGION 1..10: note = peptide
LEEEDDDNED

SEQ ID NO: 239 - protein, 13 aa, synthetic construct
  REGION 1..13: note = peptide
INLEEEDDDNEDE

SEQ ID NO: 240 - protein, 13 aa, synthetic construct
  REGION 1..13: note = peptide
DDDNEDEVDEQAE

SEQ ID NO: 241 - protein, 13 aa, synthetic construct
  REGION 1..13: note = peptide
LEEEDDDNEDEVD

SEQ ID NO: 242 - protein, 10 aa, synthetic construct
  REGION 1..10: note = peptide
DDNEDEVDEQ

SEQ ID NO: 243 - protein, 7 aa, synthetic construct
  REGION 1..7: note = peptide
EDDDNED

SEQ ID NO: 244 - protein, 7 aa, synthetic construct
  REGION 1..7: note = peptide
NLEEEDD

SEQ ID NO: 245 - protein, 7 aa, synthetic construct
  REGION 1..7: note = peptide
DDNEDEV

SEQ ID NO: 246 - protein, 10 aa, synthetic construct
  REGION 1..10: note = peptide
DDDNEDEVDE

SEQ ID NO: 247 - protein, 7 aa, synthetic construct
  REGION 1..7: note = peptide
DDDNEDE

SEQ ID NO: 248 - protein, 10 aa, synthetic construct
  REGION 1..10: note = peptide
EEEDDDNEDE

SEQ ID NO: 249 - protein, 7 aa, synthetic construct
  REGION 1..7: note = peptide
EEDDDNE

SEQ ID NO: 250 - protein, 10 aa, synthetic construct
  REGION 1..10: note = peptide
EDDDNEDEVD

SEQ ID NO: 251 - protein, 7 aa, synthetic construct
  REGION 1..7: note = peptide
EDEVDEQ

SEQ ID NO: 252 - protein, 13 aa, synthetic construct
  REGION 1..13: note = peptide
EEDDDNEDEVDEQ

SEQ ID NO: 253 - protein, 10 aa, synthetic construct
  REGION 1..10: note = peptide
EEDDDNEDEV

SEQ ID NO: 254 - protein, 13 aa, synthetic construct
  REGION 1..13: note = peptide
EEEDDDNEDEVDE

SEQ ID NO: 255 - protein, 10 aa, synthetic construct
  REGION 1..10: note = peptide
EVDEQAEQQK

SEQ ID NO: 256 - protein, 13 aa, synthetic construct
  REGION 1..13: note = peptide
DNEDEVDEQAEQQ

SEQ ID NO: 257 - protein, 10 aa, synthetic construct
  REGION 1..10: note = peptide
VDEQAEQQKT

SEQ ID NO: 258 - protein, 13 aa, synthetic construct
  REGION 1..13: note = peptide
EVDEQAEQQKTHV

SEQ ID NO: 259 - protein, 13 aa, synthetic construct
  REGION 1..13: note = peptide
VDEQAEQQKTHVF

SEQ ID NO: 260 - protein, 7 aa, synthetic construct
  REGION 1..7: note = peptide
ALEINLE

SEQ ID NO: 261 - protein, 13 aa, synthetic construct
  REGION 1..13: note = peptide
WDEAATALEINLE

SEQ ID NO: 262 - protein, 10 aa, synthetic construct
  REGION 1..10: note = peptide
AATALEINLE

SEQ ID NO: 263 - protein, 13 aa, synthetic construct
  REGION 1..13: note = peptide
EWDEAATALEINL

SEQ ID NO: 264 - protein, 10 aa, synthetic construct
  REGION 1..10: note = peptide
EAATALEINL

SEQ ID NO: 265 - protein, 10 aa, synthetic construct
  REGION 1..10: note = peptide
LYSEDVDIET

SEQ ID NO: 266 - protein, 13 aa, synthetic construct
  REGION 1..13: note = peptide
LYSEDVDIETPDT

SEQ ID NO: 267 - protein, 13 aa, synthetic construct
  REGION 1..13: note = peptide
KVVLYSEDVDIET

SEQ ID NO: 268 - protein, 7 aa, synthetic construct
  REGION 1..7: note = peptide
IETPDTH

SEQ ID NO: 269 - protein, 10 aa, synthetic construct
  REGION 1..10: note = peptide
VDIETPDTHI

SEQ ID NO: 270 - protein, 10 aa, synthetic construct
  REGION 1..10: note = peptide
VLYSEDVDIE

SEQ ID NO: 271 - protein, 13 aa, synthetic construct
  REGION 1..13: note = peptide
DVDIETPDTHISY

SEQ ID NO: 272 - protein, 13 aa, synthetic construct
  REGION 1..13: note = peptide
VVLYSEDVDIETP

SEQ ID NO: 273 - protein, 13 aa, synthetic construct
  REGION 1..13: note = peptide
SEDVDIETPDTHI

SEQ ID NO: 274 - protein, 7 aa, synthetic construct
  REGION 1..7: note = peptide
ETPDTHI

SEQ ID NO: 275 - protein, 13 aa, synthetic construct
  REGION 1..13: note = peptide
VLYSEDVDIETPD

SEQ ID NO: 276 - protein, 10 aa, synthetic construct
  REGION 1..10: note = peptide
DVDIETPDTH

SEQ ID NO: 277 - protein, 10 aa, synthetic construct
  REGION 1..10: note = peptide
DIETPDTHIS

SEQ ID NO: 278 - protein, 13 aa, synthetic construct
  REGION 1..13: note = peptide
EDVDIETPDTHIS

SEQ ID NO: 279 - protein, 10 aa, synthetic construct
  REGION 1..10: note = peptide
IETPDTHISY

SEQ ID NO: 280 - protein, 13 aa, synthetic construct
  REGION 1..13: note = peptide
YSEDVDIETPDTH

SEQ ID NO: 281 - protein, 13 aa, synthetic construct
  REGION 1..13: note = peptide
VDIETPDTHISYM

SEQ ID NO: 282 - protein, 13 aa, synthetic construct
  REGION 1..13: note = peptide
PKVVLYSEDVDIE

SEQ ID NO: 283 - protein, 7 aa, synthetic construct
  REGION 1..7: note = peptide
DIETPDT

SEQ ID NO: 284 - protein, 13 aa, synthetic construct
  REGION 1..13: note = peptide
DIETPDTHISYMP

SEQ ID NO: 285 - protein, 10 aa, synthetic construct
  REGION 1..10: note = peptide
EDVDIETPDT

SEQ ID NO: 286 - protein, 10 aa, synthetic construct
  REGION 1..10: note = peptide
ETPDTHISYM

SEQ ID NO: 287 - protein, 12 aa, synthetic construct
  REGION 1..12: note = peptide
IETPDTHISYMP

SEQ ID NO: 288 - protein, 10 aa, synthetic construct
  REGION 1..10: note = peptide
DRMYSFFRNF

SEQ ID NO: 289 - protein, 7 aa, synthetic construct
  REGION 1..7: note = peptide
DRMYSFF

SEQ ID NO: 290 - protein, 7 aa, synthetic construct
  REGION 1..7: note = peptide
YSFFRNF

SEQ ID NO: 291 - protein, 13 aa, synthetic construct
  REGION 1..13: note = peptide
IPESYKDRMYSFF

SEQ ID NO: 292 - protein, 10 aa, synthetic construct
  REGION 1..10: note = peptide
SYKDRMYSFF

SEQ ID NO: 293 - protein, 10 aa, synthetic construct
  REGION 1..10: note = peptide
ESYKDRMYSF

SEQ ID NO: 294 - protein, 7 aa, synthetic construct
  REGION 1..7: note = peptide
KDRMYSF

SEQ ID NO: 295 - protein, 13 aa, synthetic construct
  REGION 1..13: note = peptide
YIPESYKDRMYSF

SEQ ID NO: 296 - protein, 13 aa, synthetic construct
  REGION 1..13: note = peptide
PESYKDRMYSFFR

SEQ ID NO: 297 - protein, 10 aa, synthetic construct
  REGION 1..10: note = peptide
YKDRMYSFFR

SEQ ID NO: 298 - protein, 7 aa, synthetic construct
  REGION 1..7: note = peptide
TRYFSMW

SEQ ID NO: 299 - protein, 7 aa, synthetic construct
  REGION 1..7: note = peptide
GDRTRYF

SEQ ID NO: 300 - protein, 10 aa, synthetic construct
  REGION 1..10: note = peptide
DSIGDRTRYF

SEQ ID NO: 301 - protein, 13 aa, synthetic construct
  REGION 1..13: note = peptide
DSIGDRTRYFSMW

SEQ ID NO: 302 - protein, 10 aa, synthetic construct
  REGION 1..10: note = peptide
GDRTRYFSMW

SEQ ID NO: 303 - protein, 10 aa, synthetic construct
  REGION 1..10: note = peptide
DRMYSFFRNF

SEQ ID NO: 304 - protein, 13 aa, synthetic construct
  REGION 1..13: note = peptide
SYKDRMYSFFRNF

SEQ ID NO: 305 - protein, 10 aa, synthetic construct
  REGION 1..10: note = peptide
NYNIGYQGFY

SEQ ID NO: 306 - protein, 10 aa, synthetic construct
  REGION 1..10: note = peptide
ANYNIGYQGF

SEQ ID NO: 307 - protein, 13 aa, synthetic construct
  REGION 1..13: note = peptide
MLANYNIGYQGFY

SEQ ID NO: 308 - protein, 7 aa, synthetic construct
  REGION 1..7: note = peptide
IGYQGFY

SEQ ID NO: 309 - protein, 13 aa, synthetic construct
  REGION 1..13: note = peptide
FLVQMLANYNIGY

SEQ ID NO: 310 - protein, 7 aa, synthetic construct
  REGION 1..7: note = peptide
NIGYQGF

SEQ ID NO: 311 - protein, 13 aa, synthetic construct
  REGION 1..13: note = peptide
QMLANYNIGYQGF

SEQ ID NO: 312 - skipped

SEQ ID NO: 313 - protein, 7 aa, synthetic construct
  REGION 1..7: note = peptide
VYLQGPI

SEQ ID NO: 314 - protein, 7 aa, synthetic construct
  REGION 1..7: note = peptide
WQNRDVY

SEQ ID NO: 315 - protein, 7 aa, synthetic construct
  REGION 1..7: note = peptide
DVYLQGP

SEQ ID NO: 316 - protein, 7 aa, synthetic construct
  REGION 1..7: note = peptide
QNRDVYL

SEQ ID NO: 317 - protein, 7 aa, synthetic construct
  REGION 1..7: note = peptide
LQGPIWA

SEQ ID NO: 318 - protein, 7 aa, synthetic construct
  REGION 1..7: note = peptide
RDVYLQG

SEQ ID NO: 319 - protein, 7 aa, synthetic construct
  REGION 1..7: note = peptide
NRDVYLQ

SEQ ID NO: 320 - skipped

SEQ ID NO: 321 - protein, 10 aa, synthetic construct
  REGION 1..10: note = peptide
FGYSTPWGYF

SEQ ID NO: 322 - protein, 10 aa, synthetic construct
  REGION 1..10: note = peptide
GYSTPWGYFD

SEQ ID NO: 323 - protein, 10 aa, synthetic construct
  REGION 1..10: note = peptide
YSTPWGYFDF

SEQ ID NO: 324 - protein, 13 aa, synthetic construct
  REGION 1..13: note = peptide
NTYFGYSTPWGYF

SEQ ID NO: 325 - protein, 13 aa, synthetic construct
  REGION 1..13: note = peptide
TPWGYFDFNRFHC

SEQ ID NO: 326 - protein, 13 aa, synthetic construct
  REGION 1..13: note = peptide
TYFGYSTPWGYFD

SEQ ID NO: 327 - protein, 13 aa, synthetic construct
  REGION 1..13: note = peptide
DNTYFGYSTPWGY

SEQ ID NO: 328 - protein, 10 aa, synthetic construct
  REGION 1..10: note = peptide
YFGYSTPWGY

SEQ ID NO: 329 - protein, 13 aa, synthetic construct
  REGION 1..13: note = peptide
FGYSTPWGYFDFN

SEQ ID NO: 330 - protein, 7 aa, synthetic construct
  REGION 1..7: note = peptide
NWLPGPC

SEQ ID NO: 331 - protein, 7 aa, synthetic construct
  REGION 1..7: note = peptide
WLPGPCY

SEQ ID NO: 332 - protein, 10 aa, synthetic construct
  REGION 1..10: note = peptide
QAKNWLPGPC

SEQ ID NO: 333 - protein, 10 aa, synthetic construct
  REGION 1..10: note = peptide
AKNWLPGPCY

SEQ ID NO: 334 - protein, 13 aa, synthetic construct
  REGION 1..13: note = peptide
MANQAKNWLPGPC

SEQ ID NO: 335 - skipped

SEQ ID NO: 336 - protein, 7 aa, synthetic construct
  REGION 1..7: note = peptide
GCLPPFP

SEQ ID NO: 337 - protein, 13 aa, synthetic construct
  REGION 1..13: note = peptide
VLGSAHQGCLPPF

SEQ ID NO: 338 - protein, 13 aa, synthetic construct
  REGION 1..13: note = peptide
LPYVLGSAHQGCL

SEQ ID NO: 339 - protein, 10 aa, synthetic construct
  REGION 1..10: note = peptide
YVLGSAHQGC

SEQ ID NO: 340 - protein, 7 aa, synthetic construct
  REGION 1..7: note = peptide
CLPPFPA

SEQ ID NO: 341 - protein, 10 aa, synthetic construct
  REGION 1..10: note = peptide
SAHQGCLPPF

SEQ ID NO: 342 - protein, 10 aa, synthetic construct
  REGION 1..10: note = peptide
VLGSAHQGCL

SEQ ID NO: 343 - protein, 13 aa, synthetic construct
  REGION 1..13: note = peptide
PYVLGSAHQGCLP

SEQ ID NO: 344 - protein, 7 aa, synthetic construct
  REGION 1..7: note = peptide
GRSSFYC

SEQ ID NO: 345 - protein, 13 aa, synthetic construct
  REGION 1..13: note = peptide
AVGRSSFYCLEYF

SEQ ID NO: 346 - protein, 10 aa, synthetic construct
  REGION 1..10: note = peptide
AVGRSSFYCL

SEQ ID NO: 347 - protein, 13 aa, synthetic construct
  REGION 1..13: note = peptide
QAVGRSSFYCLEY

SEQ ID NO: 348 - protein, 13 aa, synthetic construct
  REGION 1..13: note = peptide
NGSQAVGRSSFYC

SEQ ID NO: 349 - protein, 7 aa, synthetic construct
  REGION 1..7: note = peptide
DQYLYYL

SEQ ID NO: 350 - protein, 10 aa, synthetic construct
  REGION 1..10: note = peptide
PLIDQYLYYL

SEQ ID NO: 351 - protein, 7 aa, synthetic construct
  REGION 1..7: note = peptide
IDQYLYY

SEQ ID NO: 352 - protein, 10 aa, synthetic construct
  REGION 1..10: note = peptide
FFPSNGILIF

SEQ ID NO: 353 - protein, 13 aa, synthetic construct
  REGION 1..13: note = peptide
EERFFPSNGILIF

SEQ ID NO: 354 - protein, 10 aa, synthetic construct
  REGION 1..10: note = peptide
VGSSSGNWHC

SEQ ID NO: 355 - protein, 13 aa, synthetic construct
  REGION 1..13: note = peptide
ADGVGSSSGNWHC

SEQ ID NO: 356-357 - skipped (2 entries)

SEQ ID NO: 358 - protein, 13 aa, synthetic construct
  REGION 1..13: note = peptide
DHTLYTPYHTHPG

SEQ ID NO: 359 - protein, 11 aa, synthetic construct
  REGION 1..11: note = peptide
GRPQKRPSCIG

SEQ ID NO: 360-364 - skipped (5 entries)

SEQ ID NO: 365 - protein, 13 aa, synthetic construct
  REGION 1..13: note = peptide
CSGRVEVKVQEEW

SEQ ID NO: 366 - protein, 36 aa, synthetic construct
  REGION 1..36: note = peptide
DGENKCSGRVEVKVQEEWGTVCNNGWSMEAVSVICN

SEQ ID NO: 367 - protein, 33 aa, synthetic construct
  REGION 1..33: note = peptide
RIWMDHVSCRGNESALWDCKHDGWGKHSNCTHQ

SEQ ID NO: 368 - protein, 13 aa, synthetic construct
  REGION 1..13: note = peptide
VTNAPGEMKKELR

SEQ ID NO: 369 - protein, 13 aa, synthetic construct
  REGION 1..13: note = peptide
ASAVTNAPGEMKK

SEQ ID NO: 370 - protein, 10 aa, synthetic construct
  REGION 1..10: note = peptide
VTNAPGEMKK

SEQ ID NO: 371 - protein, 7 aa, synthetic construct
  REGION 1..7: note = peptide
VTNAPGE

SEQ ID NO: 372 - protein, 13 aa, synthetic construct
  REGION 1..13: note = peptide
GSASAVTNAPGEM

SEQ ID NO: 373 - protein, 13 aa, synthetic construct
  REGION 1..13: note = peptide
AVTNAPGEMKKEL

SEQ ID NO: 374 - protein, 13 aa, synthetic construct
  REGION 1..13: note = peptide
SASAVTNAPGEMK

SEQ ID NO: 375 - protein, 13 aa, synthetic construct
  REGION 1..13: note = peptide
SGSASAVTNAPGE

SEQ ID NO: 376 - protein, 10 aa, synthetic construct
  REGION 1..10: note = peptide
AVTNAPGEMK

SEQ ID NO: 377 - protein, 10 aa, synthetic construct
  REGION 1..10: note = peptide
SAVTNAPGEM

SEQ ID NO: 378 - protein, 10 aa, synthetic construct
  REGION 1..10: note = peptide
ASAVTNAPGE

SEQ ID NO: 379 - protein, 13 aa, synthetic construct
  REGION 1..13: note = peptide
SAVTNAPGEMKKE

SEQ ID NO: 380 - protein, 10 aa, synthetic construct
  REGION 1..10: note = peptide
TNAPGEMKKE

SEQ ID NO: 381 - protein, 10 aa, synthetic construct
  REGION 1..10: note = peptide
TNAPGEMKKE

SEQ ID NO: 382 - protein, 22 aa, synthetic construct
  REGION 1..22: note = peptide
VTNAPGEMKKELRLAGGENNCS

SEQ ID NO: 383 - protein, 15 aa, synthetic construct
  REGION 1..15: note = peptide derived from viral capsid protein
LRTGNNFEFSYQFED

SEQ ID NO: 384 - protein, 15 aa, synthetic construct
  REGION 1..15: note = peptide derived from viral capsid protein
TGNNFEFSYQFEDVP

SEQ ID NO: 385 - protein, 15 aa, synthetic construct
  REGION 1..15: note = peptide derived from viral capsid protein
VATEQYGVVADNLQQ

SEQ ID NO: 386 - protein, 15 aa, synthetic construct
  REGION 1..15: note = peptide derived from viral capsid protein
FEFSYFEDVPFHSSY

SEQ ID NO: 387 - protein, 15 aa, synthetic construct
  REGION 1..15: note = peptide derived from viral capsid protein
RTGNFEFSYFEDVPF

SEQ ID NO: 388 - protein, 15 aa, synthetic construct
  REGION 1..15: note = peptide derived from viral capsid protein
MLRTGNFEFSYFEDV

SEQ ID NO: 389 - protein, 15 aa, synthetic construct
  REGION 1..15: note = peptide derived from viral capsid protein
PVPADPPTTFNQAKL

SEQ ID NO: 390 - protein, 15 aa, synthetic construct
  REGION 1..15: note = peptide derived from viral capsid protein
TQSTGGTAGTQQLLF

SEQ ID NO: 391 - protein, 15 aa, synthetic construct
  REGION 1..15: note = peptide derived from viral capsid protein
EEEIKTTNPVATEQY

SEQ ID NO: 392 - protein, 15 aa, synthetic construct
  REGION 1..15: note = peptide derived from viral capsid protein
SSVMLTSEEEIKTTN

SEQ ID NO: 393 - protein, 15 aa, synthetic construct
  REGION 1..15: note = peptide derived from viral capsid protein
VDFAVNTEGTYSEPR

SEQ ID NO: 394 - protein, 15 aa, synthetic construct
  REGION 1..15: note = peptide derived from viral capsid protein
SVPDPQPIGEPPAGP

SEQ ID NO: 395 - protein, 15 aa, synthetic construct
  REGION 1..15: note = peptide derived from viral capsid protein
EEIKTTNPVATEQYG

SEQ ID NO: 396 - protein, 15 aa, synthetic construct
  REGION 1..15: note = peptide derived from viral capsid protein
PIGEPPAGPSGLGSG

SEQ ID NO: 397 - protein, 15 aa, synthetic construct
  REGION 1..15: note = peptide derived from viral capsid protein
VNTEGTYSEPRPIGT

SEQ ID NO: 398 - protein, 15 aa, synthetic construct
  REGION 1..15: note = peptide derived from viral capsid protein
YSSVMLTSEEEIKTT

SEQ ID NO: 399 - protein, 15 aa, synthetic construct
  REGION 1..15: note = peptide derived from viral capsid protein
VATNHQSAQTLAVPF

SEQ ID NO: 400 - protein, 15 aa, synthetic construct
  REGION 1..15: note = peptide derived from viral capsid protein
VSTNLQRGNLALGET

SEQ ID NO: 401 - protein, 15 aa, synthetic construct
  REGION 1..15: note = peptide derived from viral capsid protein
ALGETTRPATAAQTQ

SEQ ID NO: 402 - protein, 15 aa, synthetic construct
  REGION 1..15: note = peptide derived from viral capsid protein
TQTTGGTTNTQTLGF

SEQ ID NO: 403 - protein, 15 aa, synthetic construct
  REGION 1..15: note = peptide derived from viral capsid protein
DDEEKFFPQSGVLIF

SEQ ID NO: 404 - protein, 15 aa, synthetic construct
  REGION 1..15: note = peptide derived from viral capsid protein
EEEIRTTNPVATEQY

SEQ ID NO: 405 - protein, 15 aa, synthetic construct
  REGION 1..15: note = peptide derived from viral capsid protein
PVEPDSSSGTGKAGQ

SEQ ID NO: 406 - protein, 15 aa, synthetic construct
  REGION 1..15: note = peptide derived from viral capsid protein
IQYTSNYNKSVNVDF

SEQ ID NO: 407 - protein, 15 aa, synthetic construct
  REGION 1..15: note = peptide derived from viral capsid protein
TDEEEIRTTNPVATE

SEQ ID NO: 408 - protein, 15 aa, synthetic construct
  REGION 1..15: note = peptide derived from viral capsid protein
VDFTVDTNGVYSEPR

SEQ ID NO: 409 - protein, 15 aa, synthetic construct
  REGION 1..15: note = peptide derived from viral capsid protein
VDTNGVYSEPRPIGT

SEQ ID NO: 410 - protein, 15 aa, synthetic construct
  REGION 1..15: note = peptide derived from viral capsid protein
TMATGSGAPMADNNE

SEQ ID NO: 411 - protein, 15 aa, synthetic construct
  REGION 1..15: note = peptide derived from viral capsid protein
TSTVQVFTDSEYQLP

SEQ ID NO: 412 - protein, 15 aa, synthetic construct
  REGION 1..15: note = peptide derived from viral capsid protein
LYYLSRTNTPSGTTT

SEQ ID NO: 413 - protein, 15 aa, synthetic construct
  REGION 1..15: note = peptide derived from viral capsid protein
TADVNTQGVLPGMVW

SEQ ID NO: 414 - protein, 15 aa, synthetic construct
  REGION 1..15: note = peptide derived from viral capsid protein
GSEKTNVDIEKVMIT

SEQ ID NO: 415 - protein, 15 aa, synthetic construct
  REGION 1..15: note = peptide derived from viral capsid protein
TNTMATGSGAPMADN

SEQ ID NO: 416 - protein, 15 aa, synthetic construct
  REGION 1..15: note = peptide derived from viral capsid protein
WNPEIQYTSNYNKSV

SEQ ID NO: 417 - protein, 15 aa, synthetic construct
  REGION 1..15: note = peptide derived from viral capsid protein
SYTFEDVPFHSSYAH

SEQ ID NO: 418 - protein, 15 aa, synthetic construct
  REGION 1..15: note = peptide derived from viral capsid protein
EDVPFHSSYAHSQSL

SEQ ID NO: 419 - protein, 15 aa, synthetic construct
  REGION 1..15: note = peptide derived from viral capsid protein
SSTDPATGDVHVMGA

SEQ ID NO: 420 - protein, 15 aa, synthetic construct
  REGION 1..15: note = peptide derived from viral capsid protein
ATERFGTVAVNLQSS

SEQ ID NO: 421 - protein, 15 aa, synthetic construct
  REGION 1..15: note = peptide derived from viral capsid protein
WLEDNLSEGIREWWD

SEQ ID NO: 422 - protein, 15 aa, synthetic construct
  REGION 1..15: note = peptide derived from viral capsid protein
EEEIKATNPVATERF

SEQ ID NO: 423 - protein, 15 aa, synthetic construct
  REGION 1..15: note = peptide derived from viral capsid protein
LEDNLSEGIREWWDL

SEQ ID NO: 424 - protein, 15 aa, synthetic construct
  REGION 1..15: note = peptide derived from viral capsid protein
DAEFQERLQEDTSFG

SEQ ID NO: 425 - protein, 15 aa, synthetic construct
  REGION 1..15: note = peptide derived from viral capsid protein
EWELQKENSKRWNPE

SEQ ID NO: 426 - protein, 15 aa, synthetic construct
  REGION 1..15: note = peptide derived from viral capsid protein
SFITQYSTGQVSVEI

SEQ ID NO: 427 - protein, 15 aa, synthetic construct
  REGION 1..15: note = peptide derived from viral capsid protein
EIEWELQKENSKRWN

SEQ ID NO: 428 - protein, 15 aa, synthetic construct
  REGION 1..15: note = peptide derived from viral capsid protein
ITQYSTGQVSVEIEW

SEQ ID NO: 429 - protein, 15 aa, synthetic construct
  REGION 1..15: note = peptide derived from viral capsid protein
TDEEEIKATNPVATE

SEQ ID NO: 430 - protein, 15 aa, synthetic construct
  REGION 1..15: note = peptide derived from viral capsid protein
EEGAKTAPGKKRPVE

SEQ ID NO: 431 - protein, 15 aa, synthetic construct
  REGION 1..15: note = peptide derived from viral capsid protein
IQVKEVTTNDGVTTI

SEQ ID NO: 432 - protein, 15 aa, synthetic construct
  REGION 1..15: note = peptide derived from viral capsid protein
SDSEYQLPYVLGSAH

SEQ ID NO: 433 - protein, 15 aa, synthetic construct
  REGION 1..15: note = peptide derived from viral capsid protein
PLGEPPATPAAVGPT

SEQ ID NO: 434 - protein, 15 aa, synthetic construct
  REGION 1..15: note = peptide derived from viral capsid protein
SSASTGASNDNHYFG

SEQ ID NO: 435 - protein, 15 aa, synthetic construct
  REGION 1..15: note = peptide derived from viral capsid protein
PVDQSPQEPDSSSGV

SEQ ID NO: 436 - protein, 15 aa, synthetic construct
  REGION 1..15: note = peptide derived from viral capsid protein
EEAAKTAPGKKRPVD

SEQ ID NO: 437 - protein, 15 aa, synthetic construct
  REGION 1..15: note = peptide derived from viral capsid protein
APGKKRPVDQSPQEP

SEQ ID NO: 438 - protein, 15 aa, synthetic construct
  REGION 1..15: note = peptide derived from viral capsid protein
ILEPLGLVEEAAKTA

SEQ ID NO: 439 - protein, 15 aa, synthetic construct
  REGION 1..15: note = peptide derived from viral capsid protein
TRTVNDQGALPGMVW

SEQ ID NO: 440 - protein, 15 aa, synthetic construct
  REGION 1..15: note = peptide derived from viral capsid protein
KRPVDQSPQEPDSSS

SEQ ID NO: 441 - protein, 15 aa, synthetic construct
  REGION 1..15: note = peptide derived from viral capsid protein
PLGEPPAAPTSLGSN

SEQ ID NO: 442 - protein, 15 aa, synthetic construct
  REGION 1..15: note = peptide derived from viral capsid protein
GKKRPVDQSPQEPDS

SEQ ID NO: 443 - protein, 15 aa, synthetic construct
  REGION 1..15: note = peptide derived from viral capsid protein
KTAPGKKRPVDQSPQ

SEQ ID NO: 444 - protein, 15 aa, synthetic construct
  REGION 1..15: note = peptide derived from viral capsid protein
SNAELDNVMITDEEE

SEQ ID NO: 445 - protein, 15 aa, synthetic construct
  REGION 1..15: note = peptide derived from viral capsid protein
WLEDNLSEGIREWWA

SEQ ID NO: 446 - protein, 15 aa, synthetic construct
  REGION 1..15: note = peptide derived from viral capsid protein
PVPADPPTAFNKDKL

SEQ ID NO: 447 - protein, 15 aa, synthetic construct
  REGION 1..15: note = peptide derived from viral capsid protein
EFENVPFHSSYAHSQ

SEQ ID NO: 448 - protein, 15 aa, synthetic construct
  REGION 1..15: note = peptide derived from viral capsid protein
FQERLKEDTSFGGNL

SEQ ID NO: 449 - protein, 15 aa, synthetic construct
  REGION 1..15: note = peptide derived from viral capsid protein
PQILIKNTPVPADPP

SEQ ID NO: 450 - protein, 15 aa, synthetic construct
  REGION 1..15: note = peptide derived from viral capsid protein
ADAEFQERLKEDTSF

SEQ ID NO: 451 - protein, 15 aa, synthetic construct
  REGION 1..15: note = peptide derived from viral capsid protein
EEIKTTNPVATESYG

SEQ ID NO: 452 - protein, 15 aa, synthetic construct
  REGION 1..15: note = peptide derived from viral capsid protein
VEFAVNTEGVYSEPR

SEQ ID NO: 453 - protein, 15 aa, synthetic construct
  REGION 1..15: note = peptide derived from viral capsid protein
AEFQERLKEDTSFGG

SEQ ID NO: 454 - protein, 15 aa, synthetic construct
  REGION 1..15: note = peptide derived from viral capsid protein
EPDSSAGIGKSGAQP

SEQ ID NO: 455 - protein, 15 aa, synthetic construct
  REGION 1..15: note = peptide derived from viral capsid protein
LIKNTPVPADPPTAF

SEQ ID NO: 456 - protein, 15 aa, synthetic construct
  REGION 1..15: note = peptide derived from viral capsid protein
VMITNEEEIKTTNPV

SEQ ID NO: 457 - protein, 15 aa, synthetic construct
  REGION 1..15: note = peptide derived from viral capsid protein
VNTEGVYSEPRPIGT

SEQ ID NO: 458 - protein, 15 aa, synthetic construct
  REGION 1..15: note = peptide derived from viral capsid protein
DKLNSFITQYSTGQV

SEQ ID NO: 459 - protein, 15 aa, synthetic construct
  REGION 1..15: note = peptide derived from viral capsid protein
VATESYGQVATNHQS

SEQ ID NO: 460 - protein, 15 aa, synthetic construct
  REGION 1..15: note = peptide derived from viral capsid protein
DDEERFFPSNGILIF

SEQ ID NO: 461 - protein, 15 aa, synthetic construct
  REGION 1..15: note = peptide derived from viral capsid protein
EEEIKTTNPVATEEY

SEQ ID NO: 462 - protein, 15 aa, synthetic construct
  REGION 1..15: note = peptide derived from viral capsid protein
PVPADPPTTFNQSKL

SEQ ID NO: 463 - protein, 15 aa, synthetic construct
  REGION 1..15: note = peptide derived from viral capsid protein
LIKNTPVPADPPTTF

SEQ ID NO: 464 - protein, 15 aa, synthetic construct
  REGION 1..15: note = peptide derived from viral capsid protein
SSSGNWHCDSTWLGD

SEQ ID NO: 465 - protein, 15 aa, synthetic construct
  REGION 1..15: note = peptide derived from viral capsid protein
TSVDFAVNTEGVYSE

SEQ ID NO: 466 - protein, 15 aa, synthetic construct
  REGION 1..15: note = peptide derived from viral capsid protein
TTTGQNNNSNFAWTA

SEQ ID NO: 467 - protein, 15 aa, synthetic construct
  REGION 1..15: note = peptide derived from viral capsid protein
VDFAVNTEGVYSEPR

SEQ ID NO: 468 - protein, 15 aa, synthetic construct
  REGION 1..15: note = peptide derived from viral capsid protein
VSTTTGQNNNSNFAW

SEQ ID NO: 469 - protein, 15 aa, synthetic construct
  REGION 1..15: note = peptide derived from viral capsid protein
KTAPGKKRPVEPSPQ

SEQ ID NO: 470 - protein, 15 aa, synthetic construct
  REGION 1..15: note = peptide derived from viral capsid protein
TQTTGGTANTQTLGF

SEQ ID NO: 471 - protein, 15 aa, synthetic construct
  REGION 1..15: note = peptide derived from viral capsid protein
VLEPLGLVEEGAKTA

SEQ ID NO: 472 - protein, 15 aa, synthetic construct
  REGION 1..15: note = peptide derived from viral capsid protein
EEVGEGLREFLGLEA

SEQ ID NO: 473 - protein, 15 aa, synthetic construct
  REGION 1..15: note = peptide derived from viral capsid protein
DAEFQEKLADDTSFG

SEQ ID NO: 474 - protein, 15 aa, synthetic construct
  REGION 1..15: note = peptide derived from viral capsid protein
SFVDHPPDWLEEVGE

SEQ ID NO: 475 - protein, 15 aa, synthetic construct
  REGION 1..15: note = peptide derived from viral capsid protein
EWELKKENSKRWNPE

SEQ ID NO: 476 - protein, 15 aa, synthetic construct
  REGION 1..15: note = peptide derived from viral capsid protein
EMEWELKKENSKRWN

SEQ ID NO: 477 - protein, 15 aa, synthetic construct
  REGION 1..15: note = peptide derived from viral capsid protein
TNNYNDPQFVDFAPD

SEQ ID NO: 478 - protein, 15 aa, synthetic construct
  REGION 1..15: note = peptide derived from viral capsid protein
FEEVPFHSSFAPSQN

SEQ ID NO: 479 - protein, 15 aa, synthetic construct
  REGION 1..15: note = peptide derived from viral capsid protein
QYTNNYNDPQFVDFA

SEQ ID NO: 480 - protein, 15 aa, synthetic construct
  REGION 1..15: note = peptide derived from viral capsid protein
TSTVQVFTDDDYQLP

SEQ ID NO: 481 - protein, 15 aa, synthetic construct
  REGION 1..15: note = peptide derived from viral capsid protein
EDSKPSTSSDAEAGP

SEQ ID NO: 482 - protein, 15 aa, synthetic construct
  REGION 1..15: note = peptide derived from viral capsid protein
EEGAKTAPTGKRIDD

SEQ ID NO: 483 - protein, 15 aa, synthetic construct
  REGION 1..15: note = peptide derived from viral capsid protein
EVPFHSSFAPSQNLF

SEQ ID NO: 484 - protein, 15 aa, synthetic construct
  REGION 1..15: note = peptide derived from viral capsid protein
SSFITQYSTGQVTVE

SEQ ID NO: 485 - protein, 15 aa, synthetic construct
  REGION 1..15: note = peptide derived from viral capsid protein
ELEGASYQVPPQPNG

SEQ ID NO: 486 - protein, 15 aa, synthetic construct
  REGION 1..15: note = peptide derived from viral capsid protein
ERDVYLQGPIWAKIP

SEQ ID NO: 487 - protein, 15 aa, synthetic construct
  REGION 1..15: note = peptide derived from viral capsid protein
PQYGYATLNRDNTEN

SEQ ID NO: 488 - protein, 15 aa, synthetic construct
  REGION 1..15: note = peptide derived from viral capsid protein
QVTVEMEWELKKENS

SEQ ID NO: 489 - protein, 15 aa, synthetic construct
  REGION 1..15: note = peptide derived from viral capsid protein
VTVQDSTTTIANNLT

SEQ ID NO: 490 - protein, 15 aa, synthetic construct
  REGION 1..15: note = peptide derived from viral capsid protein
YNEQLEAGDNPYLKY

SEQ ID NO: 491 - protein, 15 aa, synthetic construct
  REGION 1..15: note = peptide derived from viral capsid protein
YNNHQYREIKSGSVD

SEQ ID NO: 492 - protein, 15 aa, synthetic construct
  REGION 1..15: note = peptide derived from viral capsid protein
TSSDAEAGPSGSQQL

SEQ ID NO: 493 - protein, 15 aa, synthetic construct
  REGION 1..15: note = peptide derived from viral capsid protein
FEFSYQFEDVPFHSS

SEQ ID NO: 494 - protein, 15 aa, synthetic construct
  REGION 1..15: note = peptide derived from viral capsid protein
NNFEFSYQFEDVPFH

SEQ ID NO: 495 - protein, 15 aa, synthetic construct
  REGION 1..15: note = peptide derived from viral capsid protein
YQFEDVPFHSSYAHS

SEQ ID NO: 496 - protein, 15 aa, synthetic construct
  REGION 1..15: note = peptide derived from viral capsid protein
QGAGKDNVDYSSVML

SEQ ID NO: 497 - protein, 15 aa, synthetic construct
  REGION 1..15: note = peptide derived from viral capsid protein
TPVPADPPTTFSQAK

SEQ ID NO: 498 - protein, 15 aa, synthetic construct
  REGION 1..15: note = peptide derived from viral capsid protein
IKTTNPVATEQYGVV

SEQ ID NO: 499 - protein, 15 aa, synthetic construct
  REGION 1..15: note = peptide derived from viral capsid protein
GNFEFSYFEDVPFHS

SEQ ID NO: 500 - protein, 15 aa, synthetic construct
  REGION 1..15: note = peptide derived from viral capsid protein
FSYFEDVPFHSSYAH

SEQ ID NO: 501 - protein, 15 aa, synthetic construct
  REGION 1..15: note = peptide derived from viral capsid protein
YFEDVPFHSSYAHSQ

SEQ ID NO: 502 - protein, 15 aa, synthetic construct
  REGION 1..15: note = peptide derived from viral capsid protein
EYFPSQMLRTGNFEF

SEQ ID NO: 503 - protein, 15 aa, synthetic construct
  REGION 1..15: note = peptide derived from viral capsid protein
EIKTTNPVATEQYGW

SEQ ID NO: 504 - protein, 15 aa, synthetic construct
  REGION 1..15: note = peptide derived from viral capsid protein
RTQSTGGTAGTQQLL

SEQ ID NO: 505 - protein, 15 aa, synthetic construct
  REGION 1..15: note = peptide derived from viral capsid protein
DNVDYSSVMLTSEEE

SEQ ID NO: 506 - protein, 15 aa, synthetic construct
  REGION 1..15: note = peptide derived from viral capsid protein
DEERFFPSSGVLMFG

SEQ ID NO: 507 - protein, 15 aa, synthetic construct
  REGION 1..15: note = peptide derived from viral capsid protein
TNVDFAVNTEGTYSE

SEQ ID NO: 508 - protein, 15 aa, synthetic construct
  REGION 1..15: note = peptide derived from viral capsid protein
EIQYTSNYYKSTNVD

SEQ ID NO: 509 - protein, 15 aa, synthetic construct
  REGION 1..15: note = peptide derived from viral capsid protein
RVSTTLSQNNNSNFA

SEQ ID NO: 510 - protein, 15 aa, synthetic construct
  REGION 1..15: note = peptide derived from viral capsid protein
SESVPDPQPIGEPPA

SEQ ID NO: 511 - protein, 15 aa, synthetic construct
  REGION 1..15: note = peptide derived from viral capsid protein
QRVSTTLSQNNNSNF

SEQ ID NO: 512 - protein, 15 aa, synthetic construct
  REGION 1..15: note = peptide derived from viral capsid protein
VDYSSVMLTSEEEIK

SEQ ID NO: 513 - protein, 15 aa, synthetic construct
  REGION 1..15: note = peptide derived from viral capsid protein
PQPIGEPPAGPSGLG

SEQ ID NO: 514 - protein, 15 aa, synthetic construct
  REGION 1..15: note = peptide derived from viral capsid protein
QQRVSTTLSQNNNSN

SEQ ID NO: 515 - protein, 15 aa, synthetic construct
  REGION 1..15: note = peptide derived from viral capsid protein
VSTTLSQNNNSNFAW

SEQ ID NO: 516 - protein, 15 aa, synthetic construct
  REGION 1..15: note = peptide derived from viral capsid protein
TTRPATAPQIGTVNS

SEQ ID NO: 517 - protein, 15 aa, synthetic construct
  REGION 1..15: note = peptide derived from viral capsid protein
EYGAVAINNQAANLA

SEQ ID NO: 518 - protein, 15 aa, synthetic construct
  REGION 1..15: note = peptide derived from viral capsid protein
TTRPATAAQTQVVNN

SEQ ID NO: 519 - protein, 15 aa, synthetic construct
  REGION 1..15: note = peptide derived from viral capsid protein
NQSLALGETTRPAST

SEQ ID NO: 520 - protein, 15 aa, synthetic construct
  REGION 1..15: note = peptide derived from viral capsid protein
GQMATNNQSLALGET

SEQ ID NO: 521 - protein, 15 aa, synthetic construct
  REGION 1..15: note = peptide derived from viral capsid protein
MATNNQSLALGETTR

SEQ ID NO: 522 - protein, 15 aa, synthetic construct
  REGION 1..15: note = peptide derived from viral capsid protein
TNNQSLALGETTRPA

SEQ ID NO: 523 - protein, 15 aa, synthetic construct
  REGION 1..15: note = peptide derived from viral capsid protein
DSVPDPQPIGEPPAA

SEQ ID NO: 524 - protein, 15 aa, synthetic construct
  REGION 1..15: note = peptide derived from viral capsid protein
TGDADSVPDPQPIGE

SEQ ID NO: 525 - protein, 15 aa, synthetic construct
  REGION 1..15: note = peptide derived from viral capsid protein
SLTMAAGGGAPMADN

SEQ ID NO: 526 - protein, 15 aa, synthetic construct
  REGION 1..15: note = peptide derived from viral capsid protein
TTGGTTNTQTLGFSQ

SEQ ID NO: 527 - protein, 15 aa, synthetic construct
  REGION 1..15: note = peptide derived from viral capsid protein
LYYLSRTQTTGGTTN

SEQ ID NO: 528 - protein, 15 aa, synthetic construct
  REGION 1..15: note = peptide derived from viral capsid protein
SRTQTTGGTTNTQTL

SEQ ID NO: 529 - protein, 15 aa, synthetic construct
  REGION 1..15: note = peptide derived from viral capsid protein
YLSRTQTTGGTTNTQ

SEQ ID NO: 530 - protein, 15 aa, synthetic construct
  REGION 1..15: note = peptide derived from viral capsid protein
DGYLPDWLEDTLSEG

SEQ ID NO: 531 - protein, 15 aa, synthetic construct
  REGION 1..15: note = peptide derived from viral capsid protein
PPFPADVFMVPQYGY

SEQ ID NO: 532 - protein, 15 aa, synthetic construct
  REGION 1..15: note = peptide derived from viral capsid protein
GEPVNEADAAALEHD

SEQ ID NO: 533 - protein, 15 aa, synthetic construct
  REGION 1..15: note = peptide derived from viral capsid protein
VNVDFTVDTNGVYSE

SEQ ID NO: 534 - protein, 15 aa, synthetic construct
  REGION 1..15: note = peptide derived from viral capsid protein
EEKFFPQSGVLIFGK

SEQ ID NO: 535 - protein, 15 aa, synthetic construct
  REGION 1..15: note = peptide derived from viral capsid protein
PDWLEDTLSEGIRQW

SEQ ID NO: 536 - protein, 15 aa, synthetic construct
  REGION 1..15: note = peptide derived from viral capsid protein
PVNEADAAALEHDKA

SEQ ID NO: 537 - protein, 15 aa, synthetic construct
  REGION 1..15: note = peptide derived from viral capsid protein
TNVDIEKVMITDEEE

SEQ ID NO: 538 - protein, 15 aa, synthetic construct
  REGION 1..15: note = peptide derived from viral capsid protein
VDIEKVMITDEEEIR

SEQ ID NO: 539 - protein, 15 aa, synthetic construct
  REGION 1..15: note = peptide derived from viral capsid protein
PEIQYTSNYNKSVNV

SEQ ID NO: 540 - protein, 15 aa, synthetic construct
  REGION 1..15: note = peptide derived from viral capsid protein
VEEPVKTAPGKKRPV

SEQ ID NO: 541 - protein, 15 aa, synthetic construct
  REGION 1..15: note = peptide derived from viral capsid protein
ASHKDDEEKFFPQSG

SEQ ID NO: 542 - protein, 15 aa, synthetic construct
  REGION 1..15: note = peptide derived from viral capsid protein
EPVNEADAAALEHDK

SEQ ID NO: 543 - protein, 15 aa, synthetic construct
  REGION 1..15: note = peptide derived from viral capsid protein
ERHKDDSRGLVLPGY

SEQ ID NO: 544 - protein, 15 aa, synthetic construct
  REGION 1..15: note = peptide derived from viral capsid protein
GNSSGNWHCDSTWMG

SEQ ID NO: 545 - protein, 15 aa, synthetic construct
  REGION 1..15: note = peptide derived from viral capsid protein
PVPANPSTTFSAAKF

SEQ ID NO: 546 - protein, 15 aa, synthetic construct
  REGION 1..15: note = peptide derived from viral capsid protein
AAALEHDKAYDRQLD

SEQ ID NO: 547 - protein, 15 aa, synthetic construct
  REGION 1..15: note = peptide derived from viral capsid protein
FNGLDKGEPVNEADA

SEQ ID NO: 548 - protein, 15 aa, synthetic construct
  REGION 1..15: note = peptide derived from viral capsid protein
YTSNYNKSVNVDFTV

SEQ ID NO: 549 - protein, 15 aa, synthetic construct
  REGION 1..15: note = peptide derived from viral capsid protein
EDTLSEGIRQWWKLK

SEQ ID NO: 550 - protein, 15 aa, synthetic construct
  REGION 1..15: note = peptide derived from viral capsid protein
EPDSSSGTGKAGQQP

SEQ ID NO: 551 - protein, 15 aa, synthetic construct
  REGION 1..15: note = peptide derived from viral capsid protein
NNSEYSWTGATKYHL

SEQ ID NO: 552 - protein, 15 aa, synthetic construct
  REGION 1..15: note = peptide derived from viral capsid protein
SNYNKSVNVDFTVDT

SEQ ID NO: 553 - protein, 15 aa, synthetic construct
  REGION 1..15: note = peptide derived from viral capsid protein
SSQSGASNDNHYFGY

SEQ ID NO: 554 - protein, 15 aa, synthetic construct
  REGION 1..15: note = peptide derived from viral capsid protein
KRWNPEIQYTSNYNK

SEQ ID NO: 555 - protein, 15 aa, synthetic construct
  REGION 1..15: note = peptide derived from viral capsid protein
YLSRTNTPSGTTTQS

SEQ ID NO: 556 - protein, 15 aa, synthetic construct
  REGION 1..15: note = peptide derived from viral capsid protein
YTFEDVPFHSSYAHS

SEQ ID NO: 557 - protein, 15 aa, synthetic construct
  REGION 1..15: note = peptide derived from viral capsid protein
FEDVPFHSSYAHSQS

SEQ ID NO: 558 - protein, 15 aa, synthetic construct
  REGION 1..15: note = peptide derived from viral capsid protein
QSSSTDPATGDVHVM

SEQ ID NO: 559 - protein, 15 aa, synthetic construct
  REGION 1..15: note = peptide derived from viral capsid protein
PDWLEDNLSEGIREW

SEQ ID NO: 560 - protein, 15 aa, synthetic construct
  REGION 1..15: note = peptide derived from viral capsid protein
DWLEDNLSEGIREWW

SEQ ID NO: 561 - skipped

SEQ ID NO: 562 - protein, 15 aa, synthetic construct
  REGION 1..15: note = peptide derived from viral capsid protein
DGYLPDWLEDNLSEG

SEQ ID NO: 563 - protein, 15 aa, synthetic construct
  REGION 1..15: note = peptide derived from viral capsid protein
EDNLSEGIREWWDLK

SEQ ID NO: 564 - protein, 15 aa, synthetic construct
  REGION 1..15: note = peptide derived from viral capsid protein
DNHYFGYSTPWGYFD

SEQ ID NO: 565 - protein, 15 aa, synthetic construct
  REGION 1..15: note = peptide derived from viral capsid protein
PVEQSPQEPDSSSGI

SEQ ID NO: 566 - protein, 15 aa, synthetic construct
  REGION 1..15: note = peptide derived from viral capsid protein
ADGYLPDWLEDNLSE

SEQ ID NO: 567 - protein, 15 aa, synthetic construct
  REGION 1..15: note = peptide derived from viral capsid protein
GDSESVPDPQPLGEP

SEQ ID NO: 568 - protein, 15 aa, synthetic construct
  REGION 1..15: note = peptide derived from viral capsid protein
GEPVNAADAAALEHD

SEQ ID NO: 569 - protein, 15 aa, synthetic construct
  REGION 1..15: note = peptide derived from viral capsid protein
EDTSFGGNLGRAVFQ

SEQ ID NO: 570 - protein, 15 aa, synthetic construct
  REGION 1..15: note = peptide derived from viral capsid protein
GCLPPFPADVFMIPQ

SEQ ID NO: 571 - protein, 15 aa, synthetic construct
  REGION 1..15: note = peptide derived from viral capsid protein
PVPANPPAEFSATKF

SEQ ID NO: 572 - protein, 15 aa, synthetic construct
  REGION 1..15: note = peptide derived from viral capsid protein
SESVPDPQPLGEPPA

SEQ ID NO: 573 - protein, 15 aa, synthetic construct
  REGION 1..15: note = peptide derived from viral capsid protein
EFQERLQEDTSFGGN

SEQ ID NO: 574 - protein, 15 aa, synthetic construct
  REGION 1..15: note = peptide derived from viral capsid protein
DAAALEHDKAYDQQL

SEQ ID NO: 575 - protein, 15 aa, synthetic construct
  REGION 1..15: note = peptide derived from viral capsid protein
EPVNAADAAALEHDK

SEQ ID NO: 576 - protein, 15 aa, synthetic construct
  REGION 1..15: note = peptide derived from viral capsid protein
QRVSKTKTDNNNSNF

SEQ ID NO: 577 - protein, 15 aa, synthetic construct
  REGION 1..15: note = peptide derived from viral capsid protein
DSESVPDPQPLGEPP

SEQ ID NO: 578 - protein, 15 aa, synthetic construct
  REGION 1..15: note = peptide derived from viral capsid protein
EHDKAYDQQLKAGDN

SEQ ID NO: 579 - protein, 15 aa, synthetic construct
  REGION 1..15: note = peptide derived from viral capsid protein
LPGMVWQDRDVYLQG

SEQ ID NO: 580 - protein, 15 aa, synthetic construct
  REGION 1..15: note = peptide derived from viral capsid protein
VSVEIEWELQKENSK

SEQ ID NO: 581 - protein, 15 aa, synthetic construct
  REGION 1..15: note = peptide derived from viral capsid protein
DSEYQLPYVLGSAHQ

SEQ ID NO: 582 - protein, 15 aa, synthetic construct
  REGION 1..15: note = peptide derived from viral capsid protein
PQPLGEPPATPAAVG

SEQ ID NO: 583 - protein, 15 aa, synthetic construct
  REGION 1..15: note = peptide derived from viral capsid protein
VEIEWELQKENSKRW

SEQ ID NO: 584 - protein, 15 aa, synthetic construct
  REGION 1..15: note = peptide derived from viral capsid protein
EYFPSQMLRTGNNFT

SEQ ID NO: 585 - protein, 15 aa, synthetic construct
  REGION 1..15: note = peptide derived from viral capsid protein
PLIDQYLYYLNRTQN

SEQ ID NO: 586 - protein, 15 aa, synthetic construct
  REGION 1..15: note = peptide derived from viral capsid protein
QVSVEIEWELQKENS

SEQ ID NO: 587 - protein, 15 aa, synthetic construct
  REGION 1..15: note = peptide derived from viral capsid protein
ASNDNHYFGYSTPWG

SEQ ID NO: 588 - protein, 15 aa, synthetic construct
  REGION 1..15: note = peptide derived from viral capsid protein
EIKATNPVATERFGT

SEQ ID NO: 589 - protein, 15 aa, synthetic construct
  REGION 1..15: note = peptide derived from viral capsid protein
GSAHQGCLPPFPADV

SEQ ID NO: 590 - protein, 15 aa, synthetic construct
  REGION 1..15: note = peptide derived from viral capsid protein
SSSGIGKTGQQPAKK

SEQ ID NO: 591 - protein, 15 aa, synthetic construct
  REGION 1..15: note = peptide derived from viral capsid protein
AAALEHDKAYDQQLK

SEQ ID NO: 592 - protein, 15 aa, synthetic construct
  REGION 1..15: note = peptide derived from viral capsid protein
NNFQFSYTFEDVPFH

SEQ ID NO: 593 - protein, 15 aa, synthetic construct
  REGION 1..15: note = peptide derived from viral capsid protein
TGNNFQFSYTFEDVP

SEQ ID NO: 594 - protein, 15 aa, synthetic construct
  REGION 1..15: note = peptide derived from viral capsid protein
LRTGNNFQFSYTFED

SEQ ID NO: 595 - protein, 15 aa, synthetic construct
  REGION 1..15: note = peptide derived from viral capsid protein
EADAAALEHDKAYDQ

SEQ ID NO: 596 - protein, 15 aa, synthetic construct
  REGION 1..15: note = peptide derived from viral capsid protein
PQPLGEPPAAPTSLG

SEQ ID NO: 597 - protein, 15 aa, synthetic construct
  REGION 1..15: note = peptide derived from viral capsid protein
SSSGVGKSGKQPARK

SEQ ID NO: 598 - protein, 15 aa, synthetic construct
  REGION 1..15: note = peptide derived from viral capsid protein
DDEEKFFPMHGNLIF

SEQ ID NO: 599 - protein, 15 aa, synthetic construct
  REGION 1..15: note = peptide derived from viral capsid protein
QRLSKTANDNNNSNF

SEQ ID NO: 600 - protein, 15 aa, synthetic construct
  REGION 1..15: note = peptide derived from viral capsid protein
TTSGTTNQSRLLFSQ

SEQ ID NO: 601 - protein, 15 aa, synthetic construct
  REGION 1..15: note = peptide derived from viral capsid protein
SYEFENVPFHSSYAH

SEQ ID NO: 602 - protein, 15 aa, synthetic construct
  REGION 1..15: note = peptide derived from viral capsid protein
QFSYEFENVPFHSSY

SEQ ID NO: 603 - protein, 15 aa, synthetic construct
  REGION 1..15: note = peptide derived from viral capsid protein
ERLKEDTSFGGNLGR

SEQ ID NO: 604 - protein, 15 aa, synthetic construct
  REGION 1..15: note = peptide derived from viral capsid protein
ESVPDPQPIGEPPAA

SEQ ID NO: 605 - protein, 15 aa, synthetic construct
  REGION 1..15: note = peptide derived from viral capsid protein
NNVEFAVNTEGVYSE

SEQ ID NO: 606 - protein, 15 aa, synthetic construct
  REGION 1..15: note = peptide derived from viral capsid protein
NEEEIKTTNPVATES

SEQ ID NO: 607 - protein, 15 aa, synthetic construct
  REGION 1..15: note = peptide derived from viral capsid protein
SLIFGKQGTGRDNVD

SEQ ID NO: 608 - protein, 15 aa, synthetic construct
  REGION 1..15: note = peptide derived from viral capsid protein
EDNLSEGIREWWALK

SEQ ID NO: 609 - protein, 15 aa, synthetic construct
  REGION 1..15: note = peptide derived from viral capsid protein
NSFITQYSTGQVSVE

SEQ ID NO: 610 - protein, 15 aa, synthetic construct
  REGION 1..15: note = peptide derived from viral capsid protein
SSNDNAYFGYSTPWG

SEQ ID NO: 611 - protein, 15 aa, synthetic construct
  REGION 1..15: note = peptide derived from viral capsid protein
TPVPADPPTAFNKDK

SEQ ID NO: 612 - protein, 15 aa, synthetic construct
  REGION 1..15: note = peptide derived from viral capsid protein
VEEAAKTAPGKKRPV

SEQ ID NO: 613 - protein, 15 aa, synthetic construct
  REGION 1..15: note = peptide derived from viral capsid protein
IKNTPVPADPPTAFN

SEQ ID NO: 614 - protein, 15 aa, synthetic construct
  REGION 1..15: note = peptide derived from viral capsid protein
IKTTNPVATESYGQV

SEQ ID NO: 615 - protein, 15 aa, synthetic construct
  REGION 1..15: note = peptide derived from viral capsid protein
IQYTSNYYKSNNVEF

SEQ ID NO: 616 - protein, 15 aa, synthetic construct
  REGION 1..15: note = peptide derived from viral capsid protein
QILIKNTPVPADPPT

SEQ ID NO: 617 - protein, 15 aa, synthetic construct
  REGION 1..15: note = peptide derived from viral capsid protein
AFNKDKLNSFITQYS

SEQ ID NO: 618 - protein, 15 aa, synthetic construct
  REGION 1..15: note = peptide derived from viral capsid protein
EYFPSQMLRTGNNFQ

SEQ ID NO: 619 - protein, 15 aa, synthetic construct
  REGION 1..15: note = peptide derived from viral capsid protein
ITNEEEIKTTNPVAT

SEQ ID NO: 620 - protein, 15 aa, synthetic construct
  REGION 1..15: note = peptide derived from viral capsid protein
LKEDTSFGGNLGRAV

SEQ ID NO: 621 - protein, 15 aa, synthetic construct
  REGION 1..15: note = peptide derived from viral capsid protein
VATNHQSAQAQAQTG

SEQ ID NO: 622 - protein, 15 aa, synthetic construct
  REGION 1..15: note = peptide derived from viral capsid protein
DADKVMITNEEEIKT

SEQ ID NO: 623 - protein, 15 aa, synthetic construct
  REGION 1..15: note = peptide derived from viral capsid protein
SLTMASGGGAPVADN

SEQ ID NO: 624 - protein, 15 aa, synthetic construct
  REGION 1..15: note = peptide derived from viral capsid protein
NKDKLNSFITQYSTG

SEQ ID NO: 625 - protein, 15 aa, synthetic construct
  REGION 1..15: note = peptide derived from viral capsid protein
QPIGEPPAAPSGVGS

SEQ ID NO: 626 - protein, 15 aa, synthetic construct
  REGION 1..15: note = peptide derived from viral capsid protein
DNADYSDVMLTSEEE

SEQ ID NO: 627 - protein, 15 aa, synthetic construct
  REGION 1..15: note = peptide derived from viral capsid protein
TYTFEDVPFHSSYAH

SEQ ID NO: 628 - protein, 15 aa, synthetic construct
  REGION 1..15: note = peptide derived from viral capsid protein
ARDNADYSDVMLTSE

SEQ ID NO: 629 - protein, 15 aa, synthetic construct
  REGION 1..15: note = peptide derived from viral capsid protein
IGTVNSQGALPGMVW

SEQ ID NO: 630 - protein, 15 aa, synthetic construct
  REGION 1..15: note = peptide derived from viral capsid protein
EEYGIVADNLQQQNT

SEQ ID NO: 631 - protein, 15 aa, synthetic construct
  REGION 1..15: note = peptide derived from viral capsid protein
QRVSTTTGQNNNSNF

SEQ ID NO: 632 - protein, 15 aa, synthetic construct
  REGION 1..15: note = peptide derived from viral capsid protein
DGVGSSSGNWHCDST

SEQ ID NO: 633 - protein, 15 aa, synthetic construct
  REGION 1..15: note = peptide derived from viral capsid protein
IKNTPVPADPPTTFN

SEQ ID NO: 634 - protein, 15 aa, synthetic construct
  REGION 1..15: note = peptide derived from viral capsid protein
ILIKNTPVPADPPTT

SEQ ID NO: 635 - protein, 15 aa, synthetic construct
  REGION 1..15: note = peptide derived from viral capsid protein
STIQVFTDSEYQLPY

SEQ ID NO: 636 - protein, 15 aa, synthetic construct
  REGION 1..15: note = peptide derived from viral capsid protein
CYRQQRVSTTTGQNN

SEQ ID NO: 637 - protein, 15 aa, synthetic construct
  REGION 1..15: note = peptide derived from viral capsid protein
HDKAYDQQLQAGDNP

SEQ ID NO: 638 - protein, 15 aa, synthetic construct
  REGION 1..15: note = peptide derived from viral capsid protein
LYYLSRTQTTGGTAN

SEQ ID NO: 639 - protein, 15 aa, synthetic construct
  REGION 1..15: note = peptide derived from viral capsid protein
TFNQSKLNSFITQYS

SEQ ID NO: 640 - protein, 15 aa, synthetic construct
  REGION 1..15: note = peptide derived from viral capsid protein
VTQNEGTKTIANNLT

SEQ ID NO: 641 - protein, 15 aa, synthetic construct
  REGION 1..15: note = peptide derived from viral capsid protein
QYLYYLSRTQTTGGT

SEQ ID NO: 642 - protein, 15 aa, synthetic construct
  REGION 1..15: note = peptide derived from viral capsid protein
SRTQTTGGTANTQTL

SEQ ID NO: 643 - protein, 15 aa, synthetic construct
  REGION 1..15: note = peptide derived from viral capsid protein
NTYFGYSTPWGYFDF

SEQ ID NO: 644 - protein, 15 aa, synthetic construct
  REGION 1..15: note = peptide derived from viral capsid protein
PVEPSPQRSPDSSTG

SEQ ID NO: 645 - protein, 15 aa, synthetic construct
  REGION 1..15: note = peptide derived from viral capsid protein
SVPDPQPLGEPPAAP

SEQ ID NO: 646 - protein, 15 aa, synthetic construct
  REGION 1..15: note = peptide derived from viral capsid protein
EPSPQRSPDSSTGIG

SEQ ID NO: 647 - protein, 15 aa, synthetic construct
  REGION 1..15: note = peptide derived from viral capsid protein
NNFEFTYNFEEVPFH

SEQ ID NO: 648 - protein, 15 aa, synthetic construct
  REGION 1..15: note = peptide derived from viral capsid protein
PDWLEEVGEGLREFL

SEQ ID NO: 649 - protein, 15 aa, synthetic construct
  REGION 1..15: note = peptide derived from viral capsid protein
TGNNFEFTYNFEEVP

SEQ ID NO: 650 - protein, 15 aa, synthetic construct
  REGION 1..15: note = peptide derived from viral capsid protein
LRTGNNFEFTYNFEE

SEQ ID NO: 651 - protein, 15 aa, synthetic construct
  REGION 1..15: note = peptide derived from viral capsid protein
EPVNRADEVAREHDI

SEQ ID NO: 652 - protein, 15 aa, synthetic construct
  REGION 1..15: note = peptide derived from viral capsid protein
TEEDSKPSTSSDAEA

SEQ ID NO: 653 - protein, 15 aa, synthetic construct
  REGION 1..15: note = peptide derived from viral capsid protein
TQYSTGQVTVEMEWE

SEQ ID NO: 654 - protein, 15 aa, synthetic construct
  REGION 1..15: note = peptide derived from viral capsid protein
ESETQPVNRVAYNVG

SEQ ID NO: 655 - protein, 15 aa, synthetic construct
  REGION 1..15: note = peptide derived from viral capsid protein
NLTSTVQVFTDDDYQ

SEQ ID NO: 656 - protein, 15 aa, synthetic construct
  REGION 1..15: note = peptide derived from viral capsid protein
EIQYTNNYNDPQFVD

SEQ ID NO: 657 - protein, 15 aa, synthetic construct
  REGION 1..15: note = peptide derived from viral capsid protein
PVPGNITSFSDVPVS

SEQ ID NO: 658 - protein, 15 aa, synthetic construct
  REGION 1..15: note = peptide derived from viral capsid protein
TVEMEWELKKENSKR

SEQ ID NO: 659 - protein, 15 aa, synthetic construct
  REGION 1..15: note = peptide derived from viral capsid protein
EFQEKLADDTSFGGN

SEQ ID NO: 660 - protein, 15 aa, synthetic construct
  REGION 1..15: note = peptide derived from viral capsid protein
EQLEAGDNPYLKYNH

SEQ ID NO: 661 - protein, 15 aa, synthetic construct
  REGION 1..15: note = peptide derived from viral capsid protein
NYNDPQFVDFAPDST

SEQ ID NO: 662 - protein, 15 aa, synthetic construct
  REGION 1..15: note = peptide derived from viral capsid protein
SSLGADTMSAGGGGP

SEQ ID NO: 663 - protein, 15 aa, synthetic construct
  REGION 1..15: note = peptide derived from viral capsid protein
SKPSTSSDAEAGPSG

SEQ ID NO: 664 - protein, 15 aa, synthetic construct
  REGION 1..15: note = peptide derived from viral capsid protein
FITQYSTGQVTVEME

SEQ ID NO: 665 - protein, 15 aa, synthetic construct
  REGION 1..15: note = peptide derived from viral capsid protein
EFLGLEAGPPKPKPN

SEQ ID NO: 666 - protein, 15 aa, synthetic construct
  REGION 1..15: note = peptide derived from viral capsid protein
NVGGQMATNNQSSTT

SEQ ID NO: 667 - protein, 15 aa, synthetic construct
  REGION 1..15: note = peptide derived from viral capsid protein
PSKMLRTGNNFEFTY

SEQ ID NO: 668 - protein, 15 aa, synthetic construct
  REGION 1..15: note = peptide derived from viral capsid protein
VLEPFGLVEEGAKTA

SEQ ID NO: 669 - protein, 15 aa, synthetic construct
  REGION 1..15: note = peptide derived from viral capsid protein
AQPASSLGADTMSAG

SEQ ID NO: 670 - protein, 15 aa, synthetic construct
  REGION 1..15: note = peptide derived from viral capsid protein
VQDSTTTIANNLTST

SEQ ID NO: 671 - protein, 15 aa, synthetic construct
  REGION 1..15: note = peptide derived from viral capsid protein
YLEGNMLITSESETQ

SEQ ID NO: 672 - protein, 15 aa, synthetic construct
  REGION 1..15: note = peptide derived from viral capsid protein
NVDFAVNTDGTYSEP

SEQ ID NO: 673 - protein, 15 aa, synthetic construct
  REGION 1..15: note = peptide derived from viral capsid protein
KDNVDYSSVMLTSEE

SEQ ID NO: 674 - protein, 15 aa, synthetic construct
  REGION 1..15: note = peptide derived from viral capsid protein
HDDEERFFPSSGVLM

SEQ ID NO: 675 - protein, 15 aa, synthetic construct
  REGION 1..15: note = peptide derived from viral capsid protein
SQMLRTGNFEFSYFE

SEQ ID NO: 676 - protein, 15 aa, synthetic construct
  REGION 1..15: note = peptide derived from viral capsid protein
GDSESVPDPQPIGEP

SEQ ID NO: 677 - protein, 15 aa, synthetic construct
  REGION 1..15: note = peptide derived from viral capsid protein
DNPYLRYHADAEFQE

SEQ ID NO: 678 - protein, 15 aa, synthetic construct
  REGION 1..15: note = peptide derived from viral capsid protein
NTPVPADPPTTFNQA

SEQ ID NO: 679 - protein, 15 aa, synthetic construct
  REGION 1..15: note = peptide derived from viral capsid protein
DSLVNPGVAMATHDD

SEQ ID NO: 680 - protein, 15 aa, synthetic construct
  REGION 1..15: note = peptide derived from viral capsid protein
PLGLVESPVKTAPGK

SEQ ID NO: 681 - protein, 15 aa, synthetic construct
  REGION 1..15: note = peptide derived from viral capsid protein
SRTQSTGGTAGTQQL

SEQ ID NO: 682 - protein, 15 aa, synthetic construct
  REGION 1..15: note = peptide derived from viral capsid protein
TFNQAKLASFITQYS

SEQ ID NO: 683 - protein, 15 aa, synthetic construct
  REGION 1..15: note = peptide derived from viral capsid protein
STTLSQNNNSNFAWT

SEQ ID NO: 684 - protein, 15 aa, synthetic construct
  REGION 1..15: note = peptide derived from viral capsid protein
SSTGIGKKGQQPAKK

SEQ ID NO: 685 - protein, 15 aa, synthetic construct
  REGION 1..15: note = peptide derived from viral capsid protein
KSTNVDFAVNTEGTY

SEQ ID NO: 686 - protein, 15 aa, synthetic construct
  REGION 1..15: note = peptide derived from viral capsid protein
TYSEPRPIGTRYLTR

SEQ ID NO: 687 - protein, 15 aa, synthetic construct
  REGION 1..15: note = peptide derived from viral capsid protein
EYGIVADNLQQQNLA

SEQ ID NO: 688 - protein, 15 aa, synthetic construct
  REGION 1..15: note = peptide derived from viral capsid protein
RPATAPQIGTVNSQG

SEQ ID NO: 689 - protein, 15 aa, synthetic construct
  REGION 1..15: note = peptide derived from viral capsid protein
GETTRPATAAQTQVV

SEQ ID NO: 690 - protein, 15 aa, synthetic construct
  REGION 1..15: note = peptide derived from viral capsid protein
EYGIVSSNLQAANLA

SEQ ID NO: 691 - protein, 15 aa, synthetic construct
  REGION 1..15: note = peptide derived from viral capsid protein
SNLQAANLALGETTR

SEQ ID NO: 692 - protein, 15 aa, synthetic construct
  REGION 1..15: note = peptide derived from viral capsid protein
DADSVPDPQPIGEPP

SEQ ID NO: 693 - protein, 15 aa, synthetic construct
  REGION 1..15: note = peptide derived from viral capsid protein
QGVLPGMVWQDRDVY

SEQ ID NO: 694 - protein, 15 aa, synthetic construct
  REGION 1..15: note = peptide derived from viral capsid protein
NEADAAALEHDKAYD

SEQ ID NO: 695 - protein, 15 aa, synthetic construct
  REGION 1..15: note = peptide derived from viral capsid protein
QGCLPPFPADVFMVP

SEQ ID NO: 696 - protein, 15 aa, synthetic construct
  REGION 1..15: note = peptide derived from viral capsid protein
EHDKAYDRQLDSGDN

SEQ ID NO: 697 - protein, 15 aa, synthetic construct
  REGION 1..15: note = peptide derived from viral capsid protein
PFPADVFMVPQYGYL

SEQ ID NO: 698 - protein, 15 aa, synthetic construct
  REGION 1..15: note = peptide derived from viral capsid protein
EPVKTAPGKKRPVEH

SEQ ID NO: 699 - protein, 15 aa, synthetic construct
  REGION 1..15: note = peptide derived from viral capsid protein
HKDDEEKFFPQSGVL

SEQ ID NO: 700 - protein, 15 aa, synthetic construct
  REGION 1..15: note = peptide derived from viral capsid protein
DKGEPVNEADAAALE

SEQ ID NO: 701 - protein, 15 aa, synthetic construct
  REGION 1..15: note = peptide derived from viral capsid protein
EQYGSVSTNLQRGNR

SEQ ID NO: 702 - protein, 15 aa, synthetic construct
  REGION 1..15: note = peptide derived from viral capsid protein
GPPPPKPAERHKDDS

SEQ ID NO: 703 - protein, 15 aa, synthetic construct
  REGION 1..15: note = peptide derived from viral capsid protein
IEKVMITDEEEIRTT

SEQ ID NO: 704 - protein, 15 aa, synthetic construct
  REGION 1..15: note = peptide derived from viral capsid protein
KSVNVDFTVDTNGVY

SEQ ID NO: 705 - protein, 15 aa, synthetic construct
  REGION 1..15: note = peptide derived from viral capsid protein
RPVEHSPVEPDSSSG

SEQ ID NO: 706 - protein, 15 aa, synthetic construct
  REGION 1..15: note = peptide derived from viral capsid protein
SDIRDQSRNWLPGPC

SEQ ID NO: 707 - protein, 15 aa, synthetic construct
  REGION 1..15: note = peptide derived from viral capsid protein
DNNEGADGVGNSSGN

SEQ ID NO: 708 - protein, 15 aa, synthetic construct
  REGION 1..15: note = peptide derived from viral capsid protein
PVATEQYGSVSTNLQ

SEQ ID NO: 709 - protein, 15 aa, synthetic construct
  REGION 1..15: note = peptide derived from viral capsid protein
QVKEVTQNDGTTTIA

SEQ ID NO: 710 - protein, 15 aa, synthetic construct
  REGION 1..15: note = peptide derived from viral capsid protein
STVQVFTDSEYQLPY

SEQ ID NO: 711 - protein, 15 aa, synthetic construct
  REGION 1..15: note = peptide derived from viral capsid protein
DADSVPDPQPLGQPP

SEQ ID NO: 712 - protein, 15 aa, synthetic construct
  REGION 1..15: note = peptide derived from viral capsid protein
DSGDNPYLKYNHADA

SEQ ID NO: 713 - protein, 15 aa, synthetic construct
  REGION 1..15: note = peptide derived from viral capsid protein
DSLVNPGPAMASHKD

SEQ ID NO: 714 - protein, 15 aa, synthetic construct
  REGION 1..15: note = peptide derived from viral capsid protein
ISSQSGASNDNHYFG

SEQ ID NO: 715 - protein, 15 aa, synthetic construct
  REGION 1..15: note = peptide derived from viral capsid protein
MITDEEEIRTTNPVA

SEQ ID NO: 716 - protein, 15 aa, synthetic construct
  REGION 1..15: note = peptide derived from viral capsid protein
RQWWKLKPGPPPPKP

SEQ ID NO: 717 - protein, 15 aa, synthetic construct
  REGION 1..15: note = peptide derived from viral capsid protein
VKEVTQNDGTTTIAN

SEQ ID NO: 718 - protein, 15 aa, synthetic construct
  REGION 1..15: note = peptide derived from viral capsid protein
VTQNDGTTTIANNLT

SEQ ID NO: 719 - protein, 15 aa, synthetic construct
  REGION 1..15: note = peptide derived from viral capsid protein
ADNNEGADGVGNSSG

SEQ ID NO: 720 - protein, 15 aa, synthetic construct
  REGION 1..15: note = peptide derived from viral capsid protein
PLGLVEEPVKTAPGK

SEQ ID NO: 721 - protein, 15 aa, synthetic construct
  REGION 1..15: note = peptide derived from viral capsid protein
GNNFTFSYTFEDVPF

SEQ ID NO: 722 - protein, 15 aa, synthetic construct
  REGION 1..15: note = peptide derived from viral capsid protein
FSYTFEDVPFHSSYA

SEQ ID NO: 723 - protein, 15 aa, synthetic construct
  REGION 1..15: note = peptide derived from viral capsid protein
TFSYTFEDVPFHSSY

SEQ ID NO: 724 - protein, 15 aa, synthetic construct
  REGION 1..15: note = peptide derived from viral capsid protein
DDKDKFFPMSGVMIF

SEQ ID NO: 725 - protein, 15 aa, synthetic construct
  REGION 1..15: note = peptide derived from viral capsid protein
TFEDVPFHSSYAHSQ

SEQ ID NO: 726 - protein, 15 aa, synthetic construct
  REGION 1..15: note = peptide derived from viral capsid protein
TGDVHVMGALPGMVW

SEQ ID NO: 727 - protein, 15 aa, synthetic construct
  REGION 1..15: note = peptide derived from viral capsid protein
HVMGALPGMVWQDRD

SEQ ID NO: 728 - protein, 15 aa, synthetic construct
  REGION 1..15: note = peptide derived from viral capsid protein
TVAVNLQSSSTDPAT

SEQ ID NO: 729 - protein, 15 aa, synthetic construct
  REGION 1..15: note = peptide derived from viral capsid protein
AVNLQSSSTDPATGD

SEQ ID NO: 730 - protein, 15 aa, synthetic construct
  REGION 1..15: note = peptide derived from viral capsid protein
NHYFGYSTPWGYFDF

SEQ ID NO: 731 - protein, 15 aa, synthetic construct
  REGION 1..15: note = peptide derived from viral capsid protein
GSQAVGRSSFYCLEY

SEQ ID NO: 732 - protein, 15 aa, synthetic construct
  REGION 1..15: note = peptide derived from viral capsid protein
TQYSTGQVSVEIEWE

SEQ ID NO: 733 - protein, 15 aa, synthetic construct
  REGION 1..15: note = peptide derived from viral capsid protein
YLPDWLEDNLSEGIR

SEQ ID NO: 734 - protein, 15 aa, synthetic construct
  REGION 1..15: note = peptide derived from viral capsid protein
SNTALDNVMITDEEE

SEQ ID NO: 735 - protein, 15 aa, synthetic construct
  REGION 1..15: note = peptide derived from viral capsid protein
TPWGYFDFNRFHCHF

SEQ ID NO: 736 - protein, 15 aa, synthetic construct
  REGION 1..15: note = peptide derived from viral capsid protein
YFDFNRFHCHFSPRD

SEQ ID NO: 737 - protein, 15 aa, synthetic construct
  REGION 1..15: note = peptide derived from viral capsid protein
GYLPDWLEDNLSEGI

SEQ ID NO: 738 - protein, 15 aa, synthetic construct
  REGION 1..15: note = peptide derived from viral capsid protein
YSTGQVSVEIEWELQ

SEQ ID NO: 739 - protein, 15 aa, synthetic construct
  REGION 1..15: note = peptide derived from viral capsid protein
SLDRLMNPLIDQYLY

SEQ ID NO: 740 - protein, 15 aa, synthetic construct
  REGION 1..15: note = peptide derived from viral capsid protein
STVQVFSDSEYQLPY

SEQ ID NO: 741 - protein, 15 aa, synthetic construct
  REGION 1..15: note = peptide derived from viral capsid protein
SVPDPQPLGEPPATP

SEQ ID NO: 742 - protein, 15 aa, synthetic construct
  REGION 1..15: note = peptide derived from viral capsid protein
EFSATKFASFITQYS

SEQ ID NO: 743 - protein, 15 aa, synthetic construct
  REGION 1..15: note = peptide derived from viral capsid protein
YSTPWGYFDFNRFHC

SEQ ID NO: 744 - protein, 15 aa, synthetic construct
  REGION 1..15: note = peptide derived from viral capsid protein
AHQGCLPPFPADVFM

SEQ ID NO: 745 - protein, 15 aa, synthetic construct
  REGION 1..15: note = peptide derived from viral capsid protein
ASFITQYSTGQVSVE

SEQ ID NO: 746 - protein, 15 aa, synthetic construct
  REGION 1..15: note = peptide derived from viral capsid protein
EWWDLKPGAPKPKAN

SEQ ID NO: 747 - protein, 15 aa, synthetic construct
  REGION 1..15: note = peptide derived from viral capsid protein
GEPPATPAAVGPTTM

SEQ ID NO: 748 - protein, 15 aa, synthetic construct
  REGION 1..15: note = peptide derived from viral capsid protein
MVWQDRDVYLQGPIW

SEQ ID NO: 749 - protein, 15 aa, synthetic construct
  REGION 1..15: note = peptide derived from viral capsid protein
DKGEPVNAADAAALE

SEQ ID NO: 750 - protein, 15 aa, synthetic construct
  REGION 1..15: note = peptide derived from viral capsid protein
ERLQEDTSFGGNLGR

SEQ ID NO: 751 - protein, 15 aa, synthetic construct
  REGION 1..15: note = peptide derived from viral capsid protein
EYQLPYVLGSAHQGC

SEQ ID NO: 752 - protein, 15 aa, synthetic construct
  REGION 1..15: note = peptide derived from viral capsid protein
FITQYSTGQVSVEIE

SEQ ID NO: 753 - protein, 15 aa, synthetic construct
  REGION 1..15: note = peptide derived from viral capsid protein
MITDEEEIKATNPVA

SEQ ID NO: 754 - protein, 15 aa, synthetic construct
  REGION 1..15: note = peptide derived from viral capsid protein
AADAAALEHDKAYDQ

SEQ ID NO: 755 - protein, 15 aa, synthetic construct
  REGION 1..15: note = peptide derived from viral capsid protein
AVGPTTMASGGGAPM

SEQ ID NO: 756 - protein, 15 aa, synthetic construct
  REGION 1..15: note = peptide derived from viral capsid protein
DSTWLGDRVITTSTR

SEQ ID NO: 757 - protein, 15 aa, synthetic construct
  REGION 1..15: note = peptide derived from viral capsid protein
ATPAAVGPTTMASGG

SEQ ID NO: 758 - protein, 15 aa, synthetic construct
  REGION 1..15: note = peptide derived from viral capsid protein
DNNEGADGVGNASGN

SEQ ID NO: 759 - protein, 15 aa, synthetic construct
  REGION 1..15: note = peptide derived from viral capsid protein
EQSPQEPDSSSGIGK

SEQ ID NO: 760 - protein, 15 aa, synthetic construct
  REGION 1..15: note = peptide derived from viral capsid protein
FNIQVKEVTTNDGVT

SEQ ID NO: 761 - protein, 15 aa, synthetic construct
  REGION 1..15: note = peptide derived from viral capsid protein
PAAVGPTTMASGGGA

SEQ ID NO: 762 - protein, 15 aa, synthetic construct
  REGION 1..15: note = peptide derived from viral capsid protein
SSYAHSQSLDRLMNP

SEQ ID NO: 763 - protein, 15 aa, synthetic construct
  REGION 1..15: note = peptide derived from viral capsid protein
TAPGKKRPVEQSPQE

SEQ ID NO: 764 - protein, 15 aa, synthetic construct
  REGION 1..15: note = peptide derived from viral capsid protein
FHSSYAHSQSLDRLM

SEQ ID NO: 765 - protein, 15 aa, synthetic construct
  REGION 1..15: note = peptide derived from viral capsid protein
FNGLDKGEPVNAADA

SEQ ID NO: 766 - protein, 15 aa, synthetic construct
  REGION 1..15: note = peptide derived from viral capsid protein
HSSYAHSQSLDRLMN

SEQ ID NO: 767 - protein, 15 aa, synthetic construct
  REGION 1..15: note = peptide derived from viral capsid protein
TTSTRTWALPTYNNH

SEQ ID NO: 768 - protein, 15 aa, synthetic construct
  REGION 1..15: note = peptide derived from viral capsid protein
VKEVTTNDGVTTIAN

SEQ ID NO: 769 - protein, 15 aa, synthetic construct
  REGION 1..15: note = peptide derived from viral capsid protein
DGVGNSSGNWHCDSQ

SEQ ID NO: 770 - protein, 15 aa, synthetic construct
  REGION 1..15: note = peptide derived from viral capsid protein
NSSGNWHCDSQWLGD

SEQ ID NO: 771 - protein, 15 aa, synthetic construct
  REGION 1..15: note = peptide derived from viral capsid protein
AKKRILEPLGLVEEA

SEQ ID NO: 772 - protein, 15 aa, synthetic construct
  REGION 1..15: note = peptide derived from viral capsid protein
PVPANPPTTFSPAKF

SEQ ID NO: 773 - protein, 15 aa, synthetic construct
  REGION 1..15: note = peptide derived from viral capsid protein
NNSNFPWTAASKYHL

SEQ ID NO: 774 - protein, 15 aa, synthetic construct
  REGION 1..15: note = peptide derived from viral capsid protein
PDSSSGVGKSGKQPA

SEQ ID NO: 775 - protein, 15 aa, synthetic construct
  REGION 1..15: note = peptide derived from viral capsid protein
QSSNTAPTTRTVNDQ

SEQ ID NO: 776 - protein, 15 aa, synthetic construct
  REGION 1..15: note = peptide derived from viral capsid protein
TVANNLQSSNTAPTT

SEQ ID NO: 777 - protein, 15 aa, synthetic construct
  REGION 1..15: note = peptide derived from viral capsid protein
AELDNVMITDEEEIR

SEQ ID NO: 778 - protein, 15 aa, synthetic construct
  REGION 1..15: note = peptide derived from viral capsid protein
EEKFFPMHGNLIFGK

SEQ ID NO: 779 - protein, 15 aa, synthetic construct
  REGION 1..15: note = peptide derived from viral capsid protein
GNNFQFSYEFENVPF

SEQ ID NO: 780 - protein, 15 aa, synthetic construct
  REGION 1..15: note = peptide derived from viral capsid protein
NVEFAVNTEGVYSEP

SEQ ID NO: 781 - protein, 15 aa, synthetic construct
  REGION 1..15: note = peptide derived from viral capsid protein
MLRTGNNFQFSYEFE

SEQ ID NO: 782 - protein, 15 aa, synthetic construct
  REGION 1..15: note = peptide derived from viral capsid protein
RTGNNFQFSYEFENV

SEQ ID NO: 783 - protein, 15 aa, synthetic construct
  REGION 1..15: note = peptide derived from viral capsid protein
STVQVFTDSDYQLPY

SEQ ID NO: 784 - protein, 15 aa, synthetic construct
  REGION 1..15: note = peptide derived from viral capsid protein
DGSQAVGRSSFYCLE

SEQ ID NO: 785 - protein, 15 aa, synthetic construct
  REGION 1..15: note = peptide derived from viral capsid protein
EFAVNTEGVYSEPRP

SEQ ID NO: 786 - protein, 15 aa, synthetic construct
  REGION 1..15: note = peptide derived from viral capsid protein
EFAWPGASSWALNGR

SEQ ID NO: 787 - protein, 15 aa, synthetic construct
  REGION 1..15: note = peptide derived from viral capsid protein
DTESVPDPQPIGEPP

SEQ ID NO: 788 - protein, 15 aa, synthetic construct
  REGION 1..15: note = peptide derived from viral capsid protein
NNNSEFAWPGASSWA

SEQ ID NO: 789 - protein, 15 aa, synthetic construct
  REGION 1..15: note = peptide derived from viral capsid protein
NTPVPADPPTAFNKD

SEQ ID NO: 790 - protein, 15 aa, synthetic construct
  REGION 1..15: note = peptide derived from viral capsid protein
STTVTQNNNSEFAWP

SEQ ID NO: 791 - protein, 15 aa, synthetic construct
  REGION 1..15: note = peptide derived from viral capsid protein
EIQYTSNYYKSNNVE

SEQ ID NO: 792 - protein, 15 aa, synthetic construct
  REGION 1..15: note = peptide derived from viral capsid protein
ENVPFHSSYAHSQSL

SEQ ID NO: 793 - protein, 15 aa, synthetic construct
  REGION 1..15: note = peptide derived from viral capsid protein
ILIKNTPVPADPPTA

SEQ ID NO: 794 - protein, 15 aa, synthetic construct
  REGION 1..15: note = peptide derived from viral capsid protein
RVSTTVTQNNNSEFA

SEQ ID NO: 795 - protein, 15 aa, synthetic construct
  REGION 1..15: note = peptide derived from viral capsid protein
SDYQLPYVLGSAHEG

SEQ ID NO: 796 - protein, 15 aa, synthetic construct
  REGION 1..15: note = peptide derived from viral capsid protein
GNGLDKGEPVNAADA

SEQ ID NO: 797 - protein, 15 aa, synthetic construct
  REGION 1..15: note = peptide derived from viral capsid protein
KSNNVEFAVNTEGVY

SEQ ID NO: 798 - protein, 15 aa, synthetic construct
  REGION 1..15: note = peptide derived from viral capsid protein
LNSFITQYSTGQVSV

SEQ ID NO: 799 - protein, 15 aa, synthetic construct
  REGION 1..15: note = peptide derived from viral capsid protein
QQTLKFSVAGPSNMA

SEQ ID NO: 800 - protein, 15 aa, synthetic construct
  REGION 1..15: note = peptide derived from viral capsid protein
SSGNWHCDSQWLGDR

SEQ ID NO: 801 - protein, 15 aa, synthetic construct
  REGION 1..15: note = peptide derived from viral capsid protein
ADNNEGADGVGSSSG

SEQ ID NO: 802 - protein, 15 aa, synthetic construct
  REGION 1..15: note = peptide derived from viral capsid protein
ASGGGAPVADNNEGA

SEQ ID NO: 803 - protein, 15 aa, synthetic construct
  REGION 1..15: note = peptide derived from viral capsid protein
IGEPPAAPSGVGSLT

SEQ ID NO: 804 - protein, 15 aa, synthetic construct
  REGION 1..15: note = peptide derived from viral capsid protein
PLGLVEEAAKTAPGK

SEQ ID NO: 805 - protein, 15 aa, synthetic construct
  REGION 1..15: note = peptide derived from viral capsid protein
SAGIGKSGAQPAKKR

SEQ ID NO: 806 - protein, 15 aa, synthetic construct
  REGION 1..15: note = peptide derived from viral capsid protein
ENSKRWNPEIQYTSN

SEQ ID NO: 807 - protein, 15 aa, synthetic construct
  REGION 1..15: note = peptide derived from viral capsid protein
ELQKENSKRWNPEIQ

SEQ ID NO: 808 - protein, 15 aa, synthetic construct
  REGION 1..15: note = peptide derived from viral capsid protein
GNNFQFTYTFEDVPF

SEQ ID NO: 809 - protein, 15 aa, synthetic construct
  REGION 1..15: note = peptide derived from viral capsid protein
EERFFPSNGILIFGK

SEQ ID NO: 810 - protein, 15 aa, synthetic construct
  REGION 1..15: note = peptide derived from viral capsid protein
PVATEEYGIVADNLQ

SEQ ID NO: 811 - protein, 15 aa, synthetic construct
  REGION 1..15: note = peptide derived from viral capsid protein
QFTYTFEDVPFHSSY

SEQ ID NO: 812 - protein, 15 aa, synthetic construct
  REGION 1..15: note = peptide derived from viral capsid protein
NTPVPADPPTTFNQS

SEQ ID NO: 813 - protein, 15 aa, synthetic construct
  REGION 1..15: note = peptide derived from viral capsid protein
EIKTTNPVATEEYGI

SEQ ID NO: 814 - protein, 15 aa, synthetic construct
  REGION 1..15: note = peptide derived from viral capsid protein
GSSSGNWHCDSTWLG

SEQ ID NO: 815 - protein, 15 aa, synthetic construct
  REGION 1..15: note = peptide derived from viral capsid protein
RTGNNFQFTYTFEDV

SEQ ID NO: 816 - protein, 15 aa, synthetic construct
  REGION 1..15: note = peptide derived from viral capsid protein
TNPVATEEYGIVADN

SEQ ID NO: 817 - protein, 15 aa, synthetic construct
  REGION 1..15: note = peptide derived from viral capsid protein
TSEEEIKTTNPVATE

SEQ ID NO: 818 - protein, 15 aa, synthetic construct
  REGION 1..15: note = peptide derived from viral capsid protein
GPCYRQQRVSTTTGQ

SEQ ID NO: 819 - protein, 15 aa, synthetic construct
  REGION 1..15: note = peptide derived from viral capsid protein
LPGPCYRQQRVSTTT

SEQ ID NO: 820 - protein, 15 aa, synthetic construct
  REGION 1..15: note = peptide derived from viral capsid protein
TTGGTANTQTLGFSQ

SEQ ID NO: 821 - protein, 15 aa, synthetic construct
  REGION 1..15: note = peptide derived from viral capsid protein
KQISNGTSGGATNDN

SEQ ID NO: 822 - protein, 15 aa, synthetic construct
  REGION 1..15: note = peptide derived from viral capsid protein
KQNAARDNADYSDVM

SEQ ID NO: 823 - protein, 15 aa, synthetic construct
  REGION 1..15: note = peptide derived from viral capsid protein
NAARDNADYSDVMLT

SEQ ID NO: 824 - protein, 15 aa, synthetic construct
  REGION 1..15: note = peptide derived from viral capsid protein
SKLNSFITQYSTGQV

SEQ ID NO: 825 - protein, 15 aa, synthetic construct
  REGION 1..15: note = peptide derived from viral capsid protein
VKEVTQNEGTKTIAN

SEQ ID NO: 826 - protein, 15 aa, synthetic construct
  REGION 1..15: note = peptide derived from viral capsid protein
VNSQGALPGMVWQNR

SEQ ID NO: 827 - protein, 15 aa, synthetic construct
  REGION 1..15: note = peptide derived from viral capsid protein
NNSNFAWTAGTKYHL

SEQ ID NO: 828 - protein, 15 aa, synthetic construct
  REGION 1..15: note = peptide derived from viral capsid protein
QQQNTAPQIGTVNSQ

SEQ ID NO: 829 - protein, 15 aa, synthetic construct
  REGION 1..15: note = peptide derived from viral capsid protein
YNNHLYKQISNGTSG

SEQ ID NO: 830 - protein, 15 aa, synthetic construct
  REGION 1..15: note = peptide derived from viral capsid protein
YSDVMLTSEEEIKTT

SEQ ID NO: 831 - protein, 15 aa, synthetic construct
  REGION 1..15: note = peptide derived from viral capsid protein
DNTYFGYSTPWGYFD

SEQ ID NO: 832 - protein, 15 aa, synthetic construct
  REGION 1..15: note = peptide derived from viral capsid protein
TYFGYSTPWGYFDFN

SEQ ID NO: 833 - protein, 15 aa, synthetic construct
  REGION 1..15: note = peptide derived from viral capsid protein
ESVPDPQPLGEPPAA

SEQ ID NO: 834 - protein, 15 aa, synthetic construct
  REGION 1..15: note = peptide derived from viral capsid protein
STGIGKKGQQPARKR

SEQ ID NO: 835 - protein, 15 aa, synthetic construct
  REGION 1..15: note = peptide derived from viral capsid protein
FGYSTPWGYFDFNRF

SEQ ID NO: 836 - protein, 15 aa, synthetic construct
  REGION 1..15: note = peptide derived from viral capsid protein
YFGYSTPWGYFDFNR

SEQ ID NO: 837 - protein, 15 aa, synthetic construct
  REGION 1..15: note = peptide derived from viral capsid protein
NAYFGYSTPWGYFDF

SEQ ID NO: 838 - protein, 15 aa, synthetic construct
  REGION 1..15: note = peptide derived from viral capsid protein
HPPDWLEEVGEGLRE

SEQ ID NO: 839 - protein, 15 aa, synthetic construct
  REGION 1..15: note = peptide derived from viral capsid protein
TENPTERSSFFCLEY

SEQ ID NO: 840 - protein, 15 aa, synthetic construct
  REGION 1..15: note = peptide derived from viral capsid protein
WLEEVGEGLREFLGL

SEQ ID NO: 841 - protein, 15 aa, synthetic construct
  REGION 1..15: note = peptide derived from viral capsid protein
YSTGQVTVEMEWELK

SEQ ID NO: 842 - protein, 15 aa, synthetic construct
  REGION 1..15: note = peptide derived from viral capsid protein
FVDFAPDSTGEYRTT

SEQ ID NO: 843 - protein, 15 aa, synthetic construct
  REGION 1..15: note = peptide derived from viral capsid protein
QEIVPGSVWMERDVY

SEQ ID NO: 844 - protein, 15 aa, synthetic construct
  REGION 1..15: note = peptide derived from viral capsid protein
TPWGYFDFNRFHSHW

SEQ ID NO: 845 - protein, 15 aa, synthetic construct
  REGION 1..15: note = peptide derived from viral capsid protein
ANAYFGYSTPWGYFD

SEQ ID NO: 846 - protein, 15 aa, synthetic construct
  REGION 1..15: note = peptide derived from viral capsid protein
DDDYQLPYVVGNGTE

SEQ ID NO: 847 - protein, 15 aa, synthetic construct
  REGION 1..15: note = peptide derived from viral capsid protein
DEVAREHDISYNEQL

SEQ ID NO: 848 - protein, 15 aa, synthetic construct
  REGION 1..15: note = peptide derived from viral capsid protein
ELKKENSKRWNPEIQ

SEQ ID NO: 849 - protein, 15 aa, synthetic construct
  REGION 1..15: note = peptide derived from viral capsid protein
GNASGDWHCDSTWMG

SEQ ID NO: 850 - protein, 15 aa, synthetic construct
  REGION 1..15: note = peptide derived from viral capsid protein
GYNYLGPGNGLDRGE

SEQ ID NO: 851 - protein, 15 aa, synthetic construct
  REGION 1..15: note = peptide derived from viral capsid protein
TSFSDVPVSSFITQY

SEQ ID NO: 852 - protein, 15 aa, synthetic construct
  REGION 1..15: note = peptide derived from viral capsid protein
ANNLTSTVQVFTDDD

SEQ ID NO: 853 - protein, 15 aa, synthetic construct
  REGION 1..15: note = peptide derived from viral capsid protein
DQYLYRFVSTNNTGG

SEQ ID NO: 854 - protein, 15 aa, synthetic construct
  REGION 1..15: note = peptide derived from viral capsid protein
EYRTTRPIGTRYLTR

SEQ ID NO: 855 - protein, 15 aa, synthetic construct
  REGION 1..15: note = peptide derived from viral capsid protein
IFNIQVKEVTVQDST

SEQ ID NO: 856 - protein, 15 aa, synthetic construct
  REGION 1..15: note = peptide derived from viral capsid protein
ENSKRWNPEIQYTNN

SEQ ID NO: 857 - protein, 15 aa, synthetic construct
  REGION 1..15: note = peptide derived from viral capsid protein
AGPPKPKPNQQHQDQ

SEQ ID NO: 858 - protein, 15 aa, synthetic construct
  REGION 1..15: note = peptide derived from viral capsid protein
PSTSSDAEAGPSGSQ

SEQ ID NO: 859 - protein, 15 aa, synthetic construct
  REGION 1..15: note = peptide derived from viral capsid protein
TGQVTVEMEWELKKE

SEQ ID NO: 860 - protein, 15 aa, synthetic construct
  REGION 1..15: note = peptide derived from viral capsid protein
VKIFNIQVKEVTVQD

SEQ ID NO: 861 - protein, 15 aa, synthetic construct
  REGION 1..15: note = peptide derived from viral capsid protein
DSTTTIANNLTSTVQ

SEQ ID NO: 862 - protein, 15 aa, synthetic construct
  REGION 1..15: note = peptide derived from viral capsid protein
ISYNEQLEAGDNPYL

SEQ ID NO: 863 - protein, 15 aa, synthetic construct
  REGION 1..15: note = peptide derived from viral capsid protein
LGLEAGPPKPKPNQQ

SEQ ID NO: 864 - protein, 15 aa, synthetic construct
  REGION 1..15: note = peptide derived from viral capsid protein
TAPATGTYNLQEIVP

SEQ ID NO: 865 - protein, 15 aa, synthetic construct
  REGION 1..15: note = peptide derived from viral capsid protein
TMSAGGGGPLGDNNQ

SEQ ID NO: 866 - protein, 15 aa, synthetic construct
  REGION 1..15: note = peptide derived from viral capsid protein
FSYQFEDVPFHSSYA

SEQ ID NO: 867 - protein, 15 aa, synthetic construct
  REGION 1..15: note = peptide derived from viral capsid protein
VLMFGKQGAGKDNVD

SEQ ID NO: 868 - protein, 15 aa, synthetic construct
  REGION 1..15: note = peptide derived from viral capsid protein
DFAVNTDGTYSEPRP

SEQ ID NO: 869 - protein, 15 aa, synthetic construct
  REGION 1..15: note = peptide derived from viral capsid protein
DGTYSEPRPIGTRYL

SEQ ID NO: 870 - protein, 15 aa, synthetic construct
  REGION 1..15: note = peptide derived from viral capsid protein
GAVNSQGALPGMVWQ

SEQ ID NO: 871 - protein, 15 aa, synthetic construct
  REGION 1..15: note = peptide derived from viral capsid protein
QMLRTGNNFEFSYQF

SEQ ID NO: 872 - protein, 15 aa, synthetic construct
  REGION 1..15: note = peptide derived from viral capsid protein
MFGKQGAGKDNVDYS

SEQ ID NO: 873 - protein, 15 aa, synthetic construct
  REGION 1..15: note = peptide derived from viral capsid protein
APIVGAVNSQGALPG

SEQ ID NO: 874 - protein, 15 aa, synthetic construct
  REGION 1..15: note = peptide derived from viral capsid protein
IVGAVNSQGALPGMV

SEQ ID NO: 875 - protein, 15 aa, synthetic construct
  REGION 1..15: note = peptide derived from viral capsid protein
LQQQNAAPIVGAVNS

SEQ ID NO: 876 - protein, 15 aa, synthetic construct
  REGION 1..15: note = peptide derived from viral capsid protein
NTDGTYSEPRPIGTR

SEQ ID NO: 877 - protein, 15 aa, synthetic construct
  REGION 1..15: note = peptide derived from viral capsid protein
STNVDFAVNTDGTYS

SEQ ID NO: 878 - protein, 15 aa, synthetic construct
  REGION 1..15: note = peptide derived from viral capsid protein
KDDEERFFPSSGVLM

SEQ ID NO: 879 - protein, 15 aa, synthetic construct
  REGION 1..15: note = peptide derived from viral capsid protein
THKDDEERFFPSSGV

SEQ ID NO: 880 - protein, 15 aa, synthetic construct
  REGION 1..15: note = peptide derived from viral capsid protein
VNPGVAMATHKDDEE

SEQ ID NO: 881 - protein, 15 aa, synthetic construct
  REGION 1..15: note = peptide derived from viral capsid protein
KNTPVPADPPTTFSQ

SEQ ID NO: 882 - protein, 15 aa, synthetic construct
  REGION 1..15: note = peptide derived from viral capsid protein
MATHKDDEERFFPSS

SEQ ID NO: 883 - protein, 15 aa, synthetic construct
  REGION 1..15: note = peptide derived from viral capsid protein
NPVATEQYGVVADNL

SEQ ID NO: 884 - protein, 15 aa, synthetic construct
  REGION 1..15: note = peptide derived from viral capsid protein
PGVAMATHKDDEERF

SEQ ID NO: 885 - protein, 15 aa, synthetic construct
  REGION 1..15: note = peptide derived from viral capsid protein
RDSLVNPGVAMATHK

SEQ ID NO: 886 - protein, 15 aa, synthetic construct
  REGION 1..15: note = peptide derived from viral capsid protein
TTNPVATEQYGVVAD

SEQ ID NO: 887 - protein, 15 aa, synthetic construct
  REGION 1..15: note = peptide derived from viral capsid protein
VPADPPTTFSQAKLA

SEQ ID NO: 888 - protein, 15 aa, synthetic construct
  REGION 1..15: note = peptide derived from viral capsid protein
YFPSQMLRTGNNFEF

SEQ ID NO: 889 - protein, 15 aa, synthetic construct
  REGION 1..15: note = peptide derived from viral capsid protein
PSQMLRTGNNFEFSY

SEQ ID NO: 890 - protein, 15 aa, synthetic construct
  REGION 1..15: note = peptide derived from viral capsid protein
VLMFGKQGAGDNVDY

SEQ ID NO: 891 - protein, 15 aa, synthetic construct
  REGION 1..15: note = peptide derived from viral capsid protein
AGDNPYLRYHADAEF

SEQ ID NO: 892 - protein, 15 aa, synthetic construct
  REGION 1..15: note = peptide derived from viral capsid protein
AGDNVDYSSVMLTSE

SEQ ID NO: 893 - protein, 15 aa, synthetic construct
  REGION 1..15: note = peptide derived from viral capsid protein
FPSQMLRTGNFEFSY

SEQ ID NO: 894 - protein, 15 aa, synthetic construct
  REGION 1..15: note = peptide derived from viral capsid protein
IVGAVSQGALPGMVW

SEQ ID NO: 895 - protein, 15 aa, synthetic construct
  REGION 1..15: note = peptide derived from viral capsid protein
NWGFRPKRLNFLFNI

SEQ ID NO: 896 - protein, 15 aa, synthetic construct
  REGION 1..15: note = peptide derived from viral capsid protein
PVATEQYGWADNLQQ

SEQ ID NO: 897 - protein, 15 aa, synthetic construct
  REGION 1..15: note = peptide derived from viral capsid protein
EQYGWADNLQQQNAA

SEQ ID NO: 898 - protein, 15 aa, synthetic construct
  REGION 1..15: note = peptide derived from viral capsid protein
GPFNGLDKGEPVAAD

SEQ ID NO: 899 - protein, 15 aa, synthetic construct
  REGION 1..15: note = peptide derived from viral capsid protein
LVNPGVAMATHDDEE

SEQ ID NO: 900 - protein, 15 aa, synthetic construct
  REGION 1..15: note = peptide derived from viral capsid protein
LYYLSRTQSTGGTAG

SEQ ID NO: 901 - protein, 15 aa, synthetic construct
  REGION 1..15: note = peptide derived from viral capsid protein
NNMSAQAKNWLPGPC

SEQ ID NO: 902 - protein, 15 aa, synthetic construct
  REGION 1..15: note = peptide derived from viral capsid protein
YLGPFNGLDKGEPVA

SEQ ID NO: 903 - protein, 15 aa, synthetic construct
  REGION 1..15: note = peptide derived from viral capsid protein
ATEQYGWADNLQQQN

SEQ ID NO: 904 - protein, 15 aa, synthetic construct
  REGION 1..15: note = peptide derived from viral capsid protein
ATHDDEERFFPSSGV

SEQ ID NO: 905 - protein, 15 aa, synthetic construct
  REGION 1..15: note = peptide derived from viral capsid protein
CLEYFPSQMLRTGNF

SEQ ID NO: 906 - protein, 15 aa, synthetic construct
  REGION 1..15: note = peptide derived from viral capsid protein
DKGEPVAADAAALEH

SEQ ID NO: 907 - protein, 15 aa, synthetic construct
  REGION 1..15: note = peptide derived from viral capsid protein
FLFNIQVKEVTQNEG

SEQ ID NO: 908 - protein, 15 aa, synthetic construct
  REGION 1..15: note = peptide derived from viral capsid protein
GEPVAADAAALEHDK

SEQ ID NO: 909 - protein, 15 aa, synthetic construct
  REGION 1..15: note = peptide derived from viral capsid protein
LRYHADAEFQERLQE

SEQ ID NO: 910 - protein, 15 aa, synthetic construct
  REGION 1..15: note = peptide derived from viral capsid protein
NPGVAMATHDDEERF

SEQ ID NO: 911 - protein, 15 aa, synthetic construct
  REGION 1..15: note = peptide derived from viral capsid protein
PVAADAAALEHDKAY

SEQ ID NO: 912 - protein, 15 aa, synthetic construct
  REGION 1..15: note = peptide derived from viral capsid protein
QTGDSESVPDPQPIG

SEQ ID NO: 913 - protein, 15 aa, synthetic construct
  REGION 1..15: note = peptide derived from viral capsid protein
YHADAEFQERLQEDT

SEQ ID NO: 914 - protein, 15 aa, synthetic construct
  REGION 1..15: note = peptide derived from viral capsid protein
DPPTTFNQAKLASFI

SEQ ID NO: 915 - protein, 15 aa, synthetic construct
  REGION 1..15: note = peptide derived from viral capsid protein
GFRPKRLNFLFNIQV

SEQ ID NO: 916 - protein, 15 aa, synthetic construct
  REGION 1..15: note = peptide derived from viral capsid protein
GPNNMSAQAKNWLPG

SEQ ID NO: 917 - protein, 15 aa, synthetic construct
  REGION 1..15: note = peptide derived from viral capsid protein
GVAMATHDDEERFFP

SEQ ID NO: 918 - protein, 15 aa, synthetic construct
  REGION 1..15: note = peptide derived from viral capsid protein
KTTNPVATEQYGWAD

SEQ ID NO: 919 - protein, 15 aa, synthetic construct
  REGION 1..15: note = peptide derived from viral capsid protein
LEPLGLVESPVKTAP

SEQ ID NO: 920 - protein, 15 aa, synthetic construct
  REGION 1..15: note = peptide derived from viral capsid protein
LNFLFNIQVKEVTQN

SEQ ID NO: 921 - protein, 15 aa, synthetic construct
  REGION 1..15: note = peptide derived from viral capsid protein
NNNWGFRPKRLNFLF

SEQ ID NO: 922 - protein, 15 aa, synthetic construct
  REGION 1..15: note = peptide derived from viral capsid protein
PSSGVLMFGKQGAGD

SEQ ID NO: 923 - protein, 15 aa, synthetic construct
  REGION 1..15: note = peptide derived from viral capsid protein
PYLRYHADAEFQERL

SEQ ID NO: 924 - protein, 15 aa, synthetic construct
  REGION 1..15: note = peptide derived from viral capsid protein
RVLEPLGLVESPVKT

SEQ ID NO: 925 - protein, 15 aa, synthetic construct
  REGION 1..15: note = peptide derived from viral capsid protein
SPVKTAPGKKRPVEP

SEQ ID NO: 926 - protein, 15 aa, synthetic construct
  REGION 1..15: note = peptide derived from viral capsid protein
SQAGPNNMSAQAKNW

SEQ ID NO: 927 - protein, 15 aa, synthetic construct
  REGION 1..15: note = peptide derived from viral capsid protein
STGGTAGTQQLLFSQ

SEQ ID NO: 928 - protein, 15 aa, synthetic construct
  REGION 1..15: note = peptide derived from viral capsid protein
TGGTAGTQQLLFSQA

SEQ ID NO: 929 - protein, 15 aa, synthetic construct
  REGION 1..15: note = peptide derived from viral capsid protein
TNPVATEQYGWADNL

SEQ ID NO: 930 - protein, 15 aa, synthetic construct
  REGION 1..15: note = peptide derived from viral capsid protein
VESPVKTAPGKKRPV

SEQ ID NO: 931 - protein, 15 aa, synthetic construct
  REGION 1..15: note = peptide derived from viral capsid protein
VKTAPGKKRPVEPSP

SEQ ID NO: 932 - protein, 15 aa, synthetic construct
  REGION 1..15: note = peptide derived from viral capsid protein
VSQGALPGMVWQNRD

SEQ ID NO: 933 - protein, 15 aa, synthetic construct
  REGION 1..15: note = peptide derived from viral capsid protein
YLSRTQSTGGTAGTQ

SEQ ID NO: 934 - protein, 15 aa, synthetic construct
  REGION 1..15: note = peptide derived from viral capsid protein
YYLSRTQSTGGTAGT

SEQ ID NO: 935 - protein, 15 aa, synthetic construct
  REGION 1..15: note = peptide derived from viral capsid protein
NMSAQAKNWLPGPCY

SEQ ID NO: 936 - protein, 15 aa, synthetic construct
  REGION 1..15: note = peptide derived from viral capsid protein
GEPPAGPSGLGSGTM

SEQ ID NO: 937 - protein, 15 aa, synthetic construct
  REGION 1..15: note = peptide derived from viral capsid protein
SEEEIKTTNPVATEQ

SEQ ID NO: 938 - protein, 15 aa, synthetic construct
  REGION 1..15: note = peptide derived from viral capsid protein
NVDYSSVMLTSEEEI

SEQ ID NO: 939 - protein, 15 aa, synthetic construct
  REGION 1..15: note = peptide derived from viral capsid protein
FAVNTEGTYSEPRPI

SEQ ID NO: 940 - protein, 15 aa, synthetic construct
  REGION 1..15: note = peptide derived from viral capsid protein
SNYYKSTNVDFAVNT

SEQ ID NO: 941 - protein, 15 aa, synthetic construct
  REGION 1..15: note = peptide derived from viral capsid protein
TEGTYSEPRPIGTRY

SEQ ID NO: 942 - protein, 15 aa, synthetic construct
  REGION 1..15: note = peptide derived from viral capsid protein
ERFFPSSGVLMFGKQ

SEQ ID NO: 943 - protein, 15 aa, synthetic construct
  REGION 1..15: note = peptide derived from viral capsid protein
HLYKQISNGTSGGST

SEQ ID NO: 944 - protein, 15 aa, synthetic construct
  REGION 1..15: note = peptide derived from viral capsid protein
IGKKGQQPAKKRLNF

SEQ ID NO: 945 - protein, 15 aa, synthetic construct
  REGION 1..15: note = peptide derived from viral capsid protein
MSAQAKNWLPGPCYR

SEQ ID NO: 946 - protein, 15 aa, synthetic construct
  REGION 1..15: note = peptide derived from viral capsid protein
PDPQPIGEPPAGPSG

SEQ ID NO: 947 - protein, 15 aa, synthetic construct
  REGION 1..15: note = peptide derived from viral capsid protein
QYLYYLSRTQSTGGT

SEQ ID NO: 948 - protein, 15 aa, synthetic construct
  REGION 1..15: note = peptide derived from viral capsid protein
SVMLTSEEEIKTTNP

SEQ ID NO: 949 - protein, 15 aa, synthetic construct
  REGION 1..15: note = peptide derived from viral capsid protein
TLSQNNNSNFAWTGA

SEQ ID NO: 950 - protein, 15 aa, synthetic construct
  REGION 1..15: note = peptide derived from viral capsid protein
YYKSTNVDFAVNTEG

SEQ ID NO: 951 - protein, 15 aa, synthetic construct
  REGION 1..15: note = peptide derived from viral capsid protein
AGPSGLGSGTMAAGG

SEQ ID NO: 952 - protein, 15 aa, synthetic construct
  REGION 1..15: note = peptide derived from viral capsid protein
AQAKNWLPGPCYRQQ

SEQ ID NO: 953 - protein, 15 aa, synthetic construct
  REGION 1..15: note = peptide derived from viral capsid protein
CYRQQRVSTTLSQNN

SEQ ID NO: 954 - protein, 15 aa, synthetic construct
  REGION 1..15: note = peptide derived from viral capsid protein
DQYLYYLSRTQSTGG

SEQ ID NO: 955 - protein, 15 aa, synthetic construct
  REGION 1..15: note = peptide derived from viral capsid protein
DYSSVMLTSEEEIKT

SEQ ID NO: 956 - protein, 15 aa, synthetic construct
  REGION 1..15: note = peptide derived from viral capsid protein
GLGSGTMAAGGGAPM

SEQ ID NO: 957 - protein, 15 aa, synthetic construct
  REGION 1..15: note = peptide derived from viral capsid protein
GRDSLVNPGVAMATH

SEQ ID NO: 958 - protein, 15 aa, synthetic construct
  REGION 1..15: note = peptide derived from viral capsid protein
IDQYLYYLSRTQSTG

SEQ ID NO: 959 - protein, 15 aa, synthetic construct
  REGION 1..15: note = peptide derived from viral capsid protein
IQYTSNYYKSTNVDF

SEQ ID NO: 960 - protein, 15 aa, synthetic construct
  REGION 1..15: note = peptide derived from viral capsid protein
KKGQQPAKKRLNFGQ

SEQ ID NO: 961 - protein, 15 aa, synthetic construct
  REGION 1..15: note = peptide derived from viral capsid protein
KLASFITQYSTGQVS

SEQ ID NO: 962 - protein, 15 aa, synthetic construct
  REGION 1..15: note = peptide derived from viral capsid protein
KYHLNGRDSLVNPGV

SEQ ID NO: 963 - protein, 15 aa, synthetic construct
  REGION 1..15: note = peptide derived from viral capsid protein
LNGRDSLVNPGVAMA

SEQ ID NO: 964 - protein, 15 aa, synthetic construct
  REGION 1..15: note = peptide derived from viral capsid protein
NPEIQYTSNYYKSTN

SEQ ID NO: 965 - protein, 15 aa, synthetic construct
  REGION 1..15: note = peptide derived from viral capsid protein
PEIQYTSNYYKSTNV

SEQ ID NO: 966 - protein, 15 aa, synthetic construct
  REGION 1..15: note = peptide derived from viral capsid protein
PLIDQYLYYLSRTQS

SEQ ID NO: 967 - protein, 15 aa, synthetic construct
  REGION 1..15: note = peptide derived from viral capsid protein
QAKLASFITQYSTGQ

SEQ ID NO: 968 - protein, 15 aa, synthetic construct
  REGION 1..15: note = peptide derived from viral capsid protein
QISNGTSGGSTNDNT

SEQ ID NO: 969 - protein, 15 aa, synthetic construct
  REGION 1..15: note = peptide derived from viral capsid protein
QYTSNYYKSTNVDFA

SEQ ID NO: 970 - protein, 15 aa, synthetic construct
  REGION 1..15: note = peptide derived from viral capsid protein
RQQRVSTTLSQNNNS

SEQ ID NO: 971 - protein, 15 aa, synthetic construct
  REGION 1..15: note = peptide derived from viral capsid protein
SNGTSGGSTNDNTYF

SEQ ID NO: 972 - protein, 15 aa, synthetic construct
  REGION 1..15: note = peptide derived from viral capsid protein
SQNNNSNFAWTGATK

SEQ ID NO: 973 - protein, 15 aa, synthetic construct
  REGION 1..15: note = peptide derived from viral capsid protein
TGIGKKGQQPAKKRL

SEQ ID NO: 974 - protein, 15 aa, synthetic construct
  REGION 1..15: note = peptide derived from viral capsid protein
TSNYYKSTNVDFAVN

SEQ ID NO: 975 - protein, 15 aa, synthetic construct
  REGION 1..15: note = peptide derived from viral capsid protein
TTLSQNNNSNFAWTG

SEQ ID NO: 976 - protein, 15 aa, synthetic construct
  REGION 1..15: note = peptide derived from viral capsid protein
YKQISNGTSGGSTND

SEQ ID NO: 977 - protein, 15 aa, synthetic construct
  REGION 1..15: note = peptide derived from viral capsid protein
YRQQRVSTTLSQNNN

SEQ ID NO: 978 - protein, 15 aa, synthetic construct
  REGION 1..15: note = peptide derived from viral capsid protein
NNSNFAWTGATKYHL

SEQ ID NO: 979 - protein, 15 aa, synthetic construct
  REGION 1..15: note = peptide derived from viral capsid protein
GSTNDNTYFGYSTPW

SEQ ID NO: 980 - protein, 15 aa, synthetic construct
  REGION 1..15: note = peptide derived from viral capsid protein
DNGRGLVLPGYKYLG

SEQ ID NO: 981 - protein, 15 aa, synthetic construct
  REGION 1..15: note = peptide derived from viral capsid protein
NNNSNFAWTGATKYH

SEQ ID NO: 982 - protein, 15 aa, synthetic construct
  REGION 1..15: note = peptide derived from viral capsid protein
PKPKANQQKQDNGRG

SEQ ID NO: 983 - protein, 15 aa, synthetic construct
  REGION 1..15: note = peptide derived from viral capsid protein
QQKQDNGRGLVLPGY

SEQ ID NO: 984 - protein, 15 aa, synthetic construct
  REGION 1..15: note = peptide derived from viral capsid protein
SNFAWTGATKYHLNG

SEQ ID NO: 985 - protein, 15 aa, synthetic construct
  REGION 1..15: note = peptide derived from viral capsid protein
LAVPFKAQAQTGWVQ

SEQ ID NO: 986 - protein, 15 aa, synthetic construct
  REGION 1..15: note = peptide derived from viral capsid protein
QTLAVPFKAQAQTGW

SEQ ID NO: 987 - protein, 15 aa, synthetic construct
  REGION 1..15: note = peptide derived from viral capsid protein
SRTINGSGQNQQTLK

SEQ ID NO: 988 - protein, 15 aa, synthetic construct
  REGION 1..15: note = peptide derived from viral capsid protein
GETTRPARQAATADV

SEQ ID NO: 989 - protein, 15 aa, synthetic construct
  REGION 1..15: note = peptide derived from viral capsid protein
ALGETTRPARQAATA

SEQ ID NO: 990 - protein, 15 aa, synthetic construct
  REGION 1..15: note = peptide derived from viral capsid protein
GSVSTNLQRGNLALG

SEQ ID NO: 991 - protein, 15 aa, synthetic construct
  REGION 1..15: note = peptide derived from viral capsid protein
QYGSVSTNLQRGNLA

SEQ ID NO: 992 - protein, 15 aa, synthetic construct
  REGION 1..15: note = peptide derived from viral capsid protein
RPARQAATADVNTQG

SEQ ID NO: 993 - protein, 15 aa, synthetic construct
  REGION 1..15: note = peptide derived from viral capsid protein
TTRPARQAATADVNT

SEQ ID NO: 994 - protein, 15 aa, synthetic construct
  REGION 1..15: note = peptide derived from viral capsid protein
DNLQQQNLALGETTR

SEQ ID NO: 995 - protein, 15 aa, synthetic construct
  REGION 1..15: note = peptide derived from viral capsid protein
GETTRPATAPQIGTV

SEQ ID NO: 996 - protein, 15 aa, synthetic construct
  REGION 1..15: note = peptide derived from viral capsid protein
GIVADNLQQQNLALG

SEQ ID NO: 997 - protein, 15 aa, synthetic construct
  REGION 1..15: note = peptide derived from viral capsid protein
VADNLQQQNLALGET

SEQ ID NO: 998 - protein, 15 aa, synthetic construct
  REGION 1..15: note = peptide derived from viral capsid protein
RPATQAQTGLVHNQG

SEQ ID NO: 999 - protein, 15 aa, synthetic construct
  REGION 1..15: note = peptide derived from viral capsid protein
VADNLQQLALGETTR

SEQ ID NO: 1000 - protein, 15 aa, synthetic construct
  REGION 1..15: note = peptide derived from viral capsid protein
GETTRPAANTGPIVG

SEQ ID NO: 1001 - protein, 15 aa, synthetic construct
  REGION 1..15: note = peptide derived from viral capsid protein
RPAANTGPIVGNVNS

SEQ ID NO: 1002 - protein, 15 aa, synthetic construct
  REGION 1..15: note = peptide derived from viral capsid protein
TEQYGVVADNLQQLA

SEQ ID NO: 1003 - protein, 15 aa, synthetic construct
  REGION 1..15: note = peptide derived from viral capsid protein
TTRPAANTGPIVGNV

SEQ ID NO: 1004 - protein, 15 aa, synthetic construct
  REGION 1..15: note = peptide derived from viral capsid protein
VSSNLQAANLALGET

SEQ ID NO: 1005 - protein, 15 aa, synthetic construct
  REGION 1..15: note = peptide derived from viral capsid protein
GIVSSNLQAANLALG

SEQ ID NO: 1006 - protein, 15 aa, synthetic construct
  REGION 1..15: note = peptide derived from viral capsid protein
RPATAAQTQVVNNQG

SEQ ID NO: 1007 - protein, 15 aa, synthetic construct
  REGION 1..15: note = peptide derived from viral capsid protein
GETTRPASTTAPATG

SEQ ID NO: 1008 - protein, 15 aa, synthetic construct
  REGION 1..15: note = peptide derived from viral capsid protein
SLALGETTRPASTTA

SEQ ID NO: 1009 - protein, 15 aa, synthetic construct
  REGION 1..15: note = peptide derived from viral capsid protein
TTRPASTTAPATGTY

SEQ ID NO: 1010 - protein, 15 aa, synthetic construct
  REGION 1..15: note = peptide derived from viral capsid protein
VGGQMATNNQSLALG

SEQ ID NO: 1011 - protein, 15 aa, synthetic construct
  REGION 1..15: note = peptide derived from viral capsid protein
EAAKTAPGKKRPVEH

SEQ ID NO: 1012 - protein, 15 aa, synthetic construct
  REGION 1..15: note = peptide derived from viral capsid protein
APSGVGSLTMAAGGG

SEQ ID NO: 1013 - protein, 15 aa, synthetic construct
  REGION 1..15: note = peptide derived from viral capsid protein
GGTTNTQTLGFSQGG

SEQ ID NO: 1014 - protein, 15 aa, synthetic construct
  REGION 1..15: note = peptide derived from viral capsid protein
VGSLTMAAGGGAPMA

SEQ ID NO: 1015 - protein, 15 aa, synthetic construct
  REGION 1..15: note = peptide derived from viral capsid protein
GADGVGNSSGNWHCD

SEQ ID NO: 1016 - protein, 15 aa, synthetic construct
  REGION 1..15: note = peptide derived from viral capsid protein
ADAAALEHDKAYDRQ

SEQ ID NO: 1017 - protein, 15 aa, synthetic construct
  REGION 1..15: note = peptide derived from viral capsid protein
CLPPFPADVFMVPQY

SEQ ID NO: 1018 - protein, 15 aa, synthetic construct
  REGION 1..15: note = peptide derived from viral capsid protein
DKAYDRQLDSGDNPY

SEQ ID NO: 1019 - protein, 15 aa, synthetic construct
  REGION 1..15: note = peptide derived from viral capsid protein
EGADGVGNSSGNWHC

SEQ ID NO: 1020 - protein, 15 aa, synthetic construct
  REGION 1..15: note = peptide derived from viral capsid protein
NNEGADGVGNSSGNW

SEQ ID NO: 1021 - protein, 15 aa, synthetic construct
  REGION 1..15: note = peptide derived from viral capsid protein
YLPDWLEDTLSEGIR

SEQ ID NO: 1022 - protein, 15 aa, synthetic construct
  REGION 1..15: note = peptide derived from viral capsid protein
ALEHDKAYDRQLDSG

SEQ ID NO: 1023 - protein, 15 aa, synthetic construct
  REGION 1..15: note = peptide derived from viral capsid protein
DVNTQGVLPGMVWQD

SEQ ID NO: 1024 - protein, 15 aa, synthetic construct
  REGION 1..15: note = peptide derived from viral capsid protein
GPAMASHKDDEEKFF

SEQ ID NO: 1025 - protein, 15 aa, synthetic construct
  REGION 1..15: note = peptide derived from viral capsid protein
LPPFPADVFMVPQYG

SEQ ID NO: 1026 - protein, 15 aa, synthetic construct
  REGION 1..15: note = peptide derived from viral capsid protein
QRVSKTSADNNNSEY

SEQ ID NO: 1027 - protein, 15 aa, synthetic construct
  REGION 1..15: note = peptide derived from viral capsid protein
AADGYLPDWLEDTLS

SEQ ID NO: 1028 - protein, 15 aa, synthetic construct
  REGION 1..15: note = peptide derived from viral capsid protein
SSGNWHCDSTWMGDR

SEQ ID NO: 1029 - protein, 15 aa, synthetic construct
  REGION 1..15: note = peptide derived from viral capsid protein
FPADVFMVPQYGYLT

SEQ ID NO: 1030 - protein, 15 aa, synthetic construct
  REGION 1..15: note = peptide derived from viral capsid protein
GPFNGLDKGEPVNEA

SEQ ID NO: 1031 - protein, 15 aa, synthetic construct
  REGION 1..15: note = peptide derived from viral capsid protein
GVGNSSGNWHCDSTW

SEQ ID NO: 1032 - protein, 15 aa, synthetic construct
  REGION 1..15: note = peptide derived from viral capsid protein
NNLTSTVQVFTDSEY

SEQ ID NO: 1033 - protein, 15 aa, synthetic construct
  REGION 1..15: note = peptide derived from viral capsid protein
NPGPAMASHKDDEEK

SEQ ID NO: 1034 - protein, 15 aa, synthetic construct
  REGION 1..15: note = peptide derived from viral capsid protein
TAPGKKRPVEHSPVE

SEQ ID NO: 1035 - protein, 15 aa, synthetic construct
  REGION 1..15: note = peptide derived from viral capsid protein
VLPGMVWQDRDVYLQ

SEQ ID NO: 1036 - protein, 15 aa, synthetic construct
  REGION 1..15: note = peptide derived from viral capsid protein
VSKTSADNNNSEYSW

SEQ ID NO: 1037 - protein, 15 aa, synthetic construct
  REGION 1..15: note = peptide derived from viral capsid protein
AMASHKDDEEKFFPQ

SEQ ID NO: 1038 - protein, 15 aa, synthetic construct
  REGION 1..15: note = peptide derived from viral capsid protein
ATEQYGSVSTNLQRG

SEQ ID NO: 1039 - protein, 15 aa, synthetic construct
  REGION 1..15: note = peptide derived from viral capsid protein
DNNNSEYSWTGATKY

SEQ ID NO: 1040 - protein, 15 aa, synthetic construct
  REGION 1..15: note = peptide derived from viral capsid protein
DSVPDPQPLGQPPAA

SEQ ID NO: 1041 - protein, 15 aa, synthetic construct
  REGION 1..15: note = peptide derived from viral capsid protein
EKTNVDIEKVMITDE

SEQ ID NO: 1042 - protein, 15 aa, synthetic construct
  REGION 1..15: note = peptide derived from viral capsid protein
EVTQNDGTTTIANNL

SEQ ID NO: 1043 - protein, 15 aa, synthetic construct
  REGION 1..15: note = peptide derived from viral capsid protein
GNWHCDSTWMGDRVI

SEQ ID NO: 1044 - protein, 15 aa, synthetic construct
  REGION 1..15: note = peptide derived from viral capsid protein
KKRPVEHSPVEPDSS

SEQ ID NO: 1045 - protein, 15 aa, synthetic construct
  REGION 1..15: note = peptide derived from viral capsid protein
KPGPPPPKPAERHKD

SEQ ID NO: 1046 - protein, 15 aa, synthetic construct
  REGION 1..15: note = peptide derived from viral capsid protein
KTSADNNNSEYSWTG

SEQ ID NO: 1047 - protein, 15 aa, synthetic construct
  REGION 1..15: note = peptide derived from viral capsid protein
NEGADGVGNSSGNWH

SEQ ID NO: 1048 - protein, 15 aa, synthetic construct
  REGION 1..15: note = peptide derived from viral capsid protein
NLTSTVQVFTDSEYQ

SEQ ID NO: 1049 - protein, 15 aa, synthetic construct
  REGION 1..15: note = peptide derived from viral capsid protein
NTQGVLPGMVWQDRD

SEQ ID NO: 1050 - protein, 15 aa, synthetic construct
  REGION 1..15: note = peptide derived from viral capsid protein
RLNFGQTGDADSVPD

SEQ ID NO: 1051 - protein, 15 aa, synthetic construct
  REGION 1..15: note = peptide derived from viral capsid protein
SRLQFSQAGASDIRD

SEQ ID NO: 1052 - protein, 15 aa, synthetic construct
  REGION 1..15: note = peptide derived from viral capsid protein
TVQVFTDSEYQLPYV

SEQ ID NO: 1053 - protein, 15 aa, synthetic construct
  REGION 1..15: note = peptide derived from viral capsid protein
VQVFTDSEYQLPYVL

SEQ ID NO: 1054 - protein, 15 aa, synthetic construct
  REGION 1..15: note = peptide derived from viral capsid protein
WLEDTLSEGIRQWWK

SEQ ID NO: 1055 - protein, 15 aa, synthetic construct
  REGION 1..15: note = peptide derived from viral capsid protein
YNKSVNVDFTVDTNG

SEQ ID NO: 1056 - protein, 15 aa, synthetic construct
  REGION 1..15: note = peptide derived from viral capsid protein
ADGVGNSSGNWHCDS

SEQ ID NO: 1057 - protein, 15 aa, synthetic construct
  REGION 1..15: note = peptide derived from viral capsid protein
ADVFMVPQYGYLTLN

SEQ ID NO: 1058 - protein, 15 aa, synthetic construct
  REGION 1..15: note = peptide derived from viral capsid protein
ANNLTSTVQVFTDSE

SEQ ID NO: 1059 - protein, 15 aa, synthetic construct
  REGION 1..15: note = peptide derived from viral capsid protein
APSGLGTNTMATGSG

SEQ ID NO: 1060 - protein, 15 aa, synthetic construct
  REGION 1..15: note = peptide derived from viral capsid protein
FKLFNIQVKEVTQND

SEQ ID NO: 1061 - protein, 15 aa, synthetic construct
  REGION 1..15: note = peptide derived from viral capsid protein
GCLPPFPADVFMVPQ

SEQ ID NO: 1062 - protein, 15 aa, synthetic construct
  REGION 1..15: note = peptide derived from viral capsid protein
GIRQWWKLKPGPPPP

SEQ ID NO: 1063 - protein, 15 aa, synthetic construct
  REGION 1..15: note = peptide derived from viral capsid protein
GLDKGEPVNEADAAA

SEQ ID NO: 1064 - protein, 15 aa, synthetic construct
  REGION 1..15: note = peptide derived from viral capsid protein
KKRVLEPLGLVEEPV

SEQ ID NO: 1065 - protein, 15 aa, synthetic construct
  REGION 1..15: note = peptide derived from viral capsid protein
KQGSEKTNVDIEKVM

SEQ ID NO: 1066 - protein, 15 aa, synthetic construct
  REGION 1..15: note = peptide derived from viral capsid protein
KVMITDEEEIRTTNP

SEQ ID NO: 1067 - protein, 15 aa, synthetic construct
  REGION 1..15: note = peptide derived from viral capsid protein
LTSTVQVFTDSEYQL

SEQ ID NO: 1068 - protein, 15 aa, synthetic construct
  REGION 1..15: note = peptide derived from viral capsid protein
MADNNEGADGVGNSS

SEQ ID NO: 1069 - protein, 15 aa, synthetic construct
  REGION 1..15: note = peptide derived from viral capsid protein
PARKRLNFGQTGDAD

SEQ ID NO: 1070 - protein, 15 aa, synthetic construct
  REGION 1..15: note = peptide derived from viral capsid protein
PPPKPAERHKDDSRG

SEQ ID NO: 1071 - protein, 15 aa, synthetic construct
  REGION 1..15: note = peptide derived from viral capsid protein
SADNNNSEYSWTGAT

SEQ ID NO: 1072 - protein, 15 aa, synthetic construct
  REGION 1..15: note = peptide derived from viral capsid protein
TLSEGIRQWWKLKPG

SEQ ID NO: 1073 - protein, 15 aa, synthetic construct
  REGION 1..15: note = peptide derived from viral capsid protein
TNGVYSEPRPIGTRY

SEQ ID NO: 1074 - protein, 15 aa, synthetic construct
  REGION 1..15: note = peptide derived from viral capsid protein
TNTPSGTTTQSRLQF

SEQ ID NO: 1075 - protein, 15 aa, synthetic construct
  REGION 1..15: note = peptide derived from viral capsid protein
WMGDRVITTSTRTWA

SEQ ID NO: 1076 - protein, 15 aa, synthetic construct
  REGION 1..15: note = peptide derived from viral capsid protein
AATADVNTQGVLPGM

SEQ ID NO: 1077 - protein, 15 aa, synthetic construct
  REGION 1..15: note = peptide derived from viral capsid protein
AYDRQLDSGDNPYLK

SEQ ID NO: 1078 - protein, 15 aa, synthetic construct
  REGION 1..15: note = peptide derived from viral capsid protein
CDSTWMGDRVITTST

SEQ ID NO: 1079 - protein, 15 aa, synthetic construct
  REGION 1..15: note = peptide derived from viral capsid protein
DDSRGLVLPGYKYLG

SEQ ID NO: 1080 - protein, 15 aa, synthetic construct
  REGION 1..15: note = peptide derived from viral capsid protein
DPQPLGQPPAAPSGL

SEQ ID NO: 1081 - protein, 15 aa, synthetic construct
  REGION 1..15: note = peptide derived from viral capsid protein
EIRTTNPVATEQYGS

SEQ ID NO: 1082 - protein, 15 aa, synthetic construct
  REGION 1..15: note = peptide derived from viral capsid protein
FGKQGSEKTNVDIEK

SEQ ID NO: 1083 - protein, 15 aa, synthetic construct
  REGION 1..15: note = peptide derived from viral capsid protein
FTVDTNGVYSEPRPI

SEQ ID NO: 1084 - protein, 15 aa, synthetic construct
  REGION 1..15: note = peptide derived from viral capsid protein
GASDIRDQSRNWLPG

SEQ ID NO: 1085 - protein, 15 aa, synthetic construct
  REGION 1..15: note = peptide derived from viral capsid protein
GLVEEPVKTAPGKKR

SEQ ID NO: 1086 - protein, 15 aa, synthetic construct
  REGION 1..15: note = peptide derived from viral capsid protein
GNRQAATADVNTQGV

SEQ ID NO: 1087 - protein, 15 aa, synthetic construct
  REGION 1..15: note = peptide derived from viral capsid protein
GQTGDADSVPDPQPL

SEQ ID NO: 1088 - protein, 15 aa, synthetic construct
  REGION 1..15: note = peptide derived from viral capsid protein
GRDSLVNPGPAMASH

SEQ ID NO: 1089 - protein, 15 aa, synthetic construct
  REGION 1..15: note = peptide derived from viral capsid protein
GSGAPMADNNEGADG

SEQ ID NO: 1090 - protein, 15 aa, synthetic construct
  REGION 1..15: note = peptide derived from viral capsid protein
GVLIFGKQGSEKTNV

SEQ ID NO: 1091 - protein, 15 aa, synthetic construct
  REGION 1..15: note = peptide derived from viral capsid protein
HSPVEPDSSSGTGKA

SEQ ID NO: 1092 - protein, 15 aa, synthetic construct
  REGION 1..15: note = peptide derived from viral capsid protein
IQVKEVTQNDGTTTI

SEQ ID NO: 1093 - protein, 15 aa, synthetic construct
  REGION 1..15: note = peptide derived from viral capsid protein
IRDQSRNWLPGPCYR

SEQ ID NO: 1094 - protein, 15 aa, synthetic construct
  REGION 1..15: note = peptide derived from viral capsid protein
KEVTQNDGTTTIANN

SEQ ID NO: 1095 - protein, 15 aa, synthetic construct
  REGION 1..15: note = peptide derived from viral capsid protein
KGEPVNEADAAALEH

SEQ ID NO: 1096 - protein, 15 aa, synthetic construct
  REGION 1..15: note = peptide derived from viral capsid protein
KLFNIQVKEVTQNDG

SEQ ID NO: 1097 - protein, 15 aa, synthetic construct
  REGION 1..15: note = peptide derived from viral capsid protein
KLKPGPPPPKPAERH

SEQ ID NO: 1098 - protein, 15 aa, synthetic construct
  REGION 1..15: note = peptide derived from viral capsid protein
LEPLGLVEEPVKTAP

SEQ ID NO: 1099 - protein, 15 aa, synthetic construct
  REGION 1..15: note = peptide derived from viral capsid protein
LIFGKQGSEKTNVDI

SEQ ID NO: 1100 - protein, 15 aa, synthetic construct
  REGION 1..15: note = peptide derived from viral capsid protein
LNFKLFNIQVKEVTQ

SEQ ID NO: 1101 - protein, 15 aa, synthetic construct
  REGION 1..15: note = peptide derived from viral capsid protein
NFGQTGDADSVPDPQ

SEQ ID NO: 1102 - protein, 15 aa, synthetic construct
  REGION 1..15: note = peptide derived from viral capsid protein
NLQRGNRQAATADVN

SEQ ID NO: 1103 - protein, 15 aa, synthetic construct
  REGION 1..15: note = peptide derived from viral capsid protein
NTPVPANPSTTFSAA

SEQ ID NO: 1104 - protein, 15 aa, synthetic construct
  REGION 1..15: note = peptide derived from viral capsid protein
PAAPSGLGTNTMATG

SEQ ID NO: 1105 - protein, 15 aa, synthetic construct
  REGION 1..15: note = peptide derived from viral capsid protein
PAERHKDDSRGLVLP

SEQ ID NO: 1106 - protein, 15 aa, synthetic construct
  REGION 1..15: note = peptide derived from viral capsid protein
PGKKRPVEHSPVEPD

SEQ ID NO: 1107 - protein, 15 aa, synthetic construct
  REGION 1..15: note = peptide derived from viral capsid protein
PLIDQYLYYLSRTNT

SEQ ID NO: 1108 - protein, 15 aa, synthetic construct
  REGION 1..15: note = peptide derived from viral capsid protein
PMADNNEGADGVGNS

SEQ ID NO: 1109 - protein, 15 aa, synthetic construct
  REGION 1..15: note = peptide derived from viral capsid protein
PQILIKNTPVPANPS

SEQ ID NO: 1110 - protein, 15 aa, synthetic construct
  REGION 1..15: note = peptide derived from viral capsid protein
QAGASDIRDQSRNWL

SEQ ID NO: 1111 - protein, 15 aa, synthetic construct
  REGION 1..15: note = peptide derived from viral capsid protein
QISSQSGASNDNHYF

SEQ ID NO: 1112 - protein, 15 aa, synthetic construct
  REGION 1..15: note = peptide derived from viral capsid protein
QRGNRQAATADVNTQ

SEQ ID NO: 1113 - protein, 15 aa, synthetic construct
  REGION 1..15: note = peptide derived from viral capsid protein
QSGVLIFGKQGSEKT

SEQ ID NO: 1114 - protein, 15 aa, synthetic construct
  REGION 1..15: note = peptide derived from viral capsid protein
RKRLNFGQTGDADSV

SEQ ID NO: 1115 - protein, 15 aa, synthetic construct
  REGION 1..15: note = peptide derived from viral capsid protein
RQQRVSKTSADNNNS

SEQ ID NO: 1116 - protein, 15 aa, synthetic construct
  REGION 1..15: note = peptide derived from viral capsid protein
RTTNPVATEQYGSVS

SEQ ID NO: 1117 - protein, 15 aa, synthetic construct
  REGION 1..15: note = peptide derived from viral capsid protein
RVLEPLGLVEEPVKT

SEQ ID NO: 1118 - protein, 15 aa, synthetic construct
  REGION 1..15: note = peptide derived from viral capsid protein
SAAKFASFITQYSTG

SEQ ID NO: 1119 - protein, 15 aa, synthetic construct
  REGION 1..15: note = peptide derived from viral capsid protein
SEYSWTGATKYHLNG

SEQ ID NO: 1120 - protein, 15 aa, synthetic construct
  REGION 1..15: note = peptide derived from viral capsid protein
SGTTTQSRLQFSQAG

SEQ ID NO: 1121 - protein, 15 aa, synthetic construct
  REGION 1..15: note = peptide derived from viral capsid protein
SRGLVLPGYKYLGPF

SEQ ID NO: 1122 - protein, 15 aa, synthetic construct
  REGION 1..15: note = peptide derived from viral capsid protein
SSGTGKAGQQPARKR

SEQ ID NO: 1123 - protein, 15 aa, synthetic construct
  REGION 1..15: note = peptide derived from viral capsid protein
TFSAAKFASFITQYS

SEQ ID NO: 1124 - protein, 15 aa, synthetic construct
  REGION 1..15: note = peptide derived from viral capsid protein
TGDADSVPDPQPLGQ

SEQ ID NO: 1125 - protein, 15 aa, synthetic construct
  REGION 1..15: note = peptide derived from viral capsid protein
TNPVATEQYGSVSTN

SEQ ID NO: 1126 - protein, 15 aa, synthetic construct
  REGION 1..15: note = peptide derived from viral capsid protein
VFMVPQYGYLTLNNG

SEQ ID NO: 1127 - protein, 15 aa, synthetic construct
  REGION 1..15: note = peptide derived from viral capsid protein
VNEADAAALEHDKAY

SEQ ID NO: 1128 - protein, 15 aa, synthetic construct
  REGION 1..15: note = peptide derived from viral capsid protein
VPDPQPLGQPPAAPS

SEQ ID NO: 1129 - protein, 15 aa, synthetic construct
  REGION 1..15: note = peptide derived from viral capsid protein
WWKLKPGPPPPKPAE

SEQ ID NO: 1130 - protein, 15 aa, synthetic construct
  REGION 1..15: note = peptide derived from viral capsid protein
GATKYHLNGRDSLVN

SEQ ID NO: 1131 - protein, 15 aa, synthetic construct
  REGION 1..15: note = peptide derived from viral capsid protein
NFTFSYTFEDVPFHS

SEQ ID NO: 1132 - protein, 15 aa, synthetic construct
  REGION 1..15: note = peptide derived from viral capsid protein
RTGNNFTFSYTFEDV

SEQ ID NO: 1133 - protein, 15 aa, synthetic construct
  REGION 1..15: note = peptide derived from viral capsid protein
EPFGLVEEGAKTAPG

SEQ ID NO: 1134 - protein, 15 aa, synthetic construct
  REGION 1..15: note = peptide derived from viral capsid protein
PVATERFGTVAVNLQ

SEQ ID NO: 1135 - protein, 15 aa, synthetic construct
  REGION 1..15: note = peptide derived from viral capsid protein
DVHVMGALPGMVWQD

SEQ ID NO: 1136 - protein, 15 aa, synthetic construct
  REGION 1..15: note = peptide derived from viral capsid protein
ERFGTVAVNLQSSST

SEQ ID NO: 1137 - protein, 15 aa, synthetic construct
  REGION 1..15: note = peptide derived from viral capsid protein
MGGFGLKHPPPQILI

SEQ ID NO: 1138 - protein, 15 aa, synthetic construct
  REGION 1..15: note = peptide derived from viral capsid protein
AMASHKDDKDKFFPM

SEQ ID NO: 1139 - protein, 15 aa, synthetic construct
  REGION 1..15: note = peptide derived from viral capsid protein
DVPFHSSYAHSQSLD

SEQ ID NO: 1140 - protein, 15 aa, synthetic construct
  REGION 1..15: note = peptide derived from viral capsid protein
FGTVAVNLQSSSTDP

SEQ ID NO: 1141 - protein, 15 aa, synthetic construct
  REGION 1..15: note = peptide derived from viral capsid protein
FHPSPLMGGFGLKHP

SEQ ID NO: 1142 - protein, 15 aa, synthetic construct
  REGION 1..15: note = peptide derived from viral capsid protein
GLKHPPPQILIKNTP

SEQ ID NO: 1143 - protein, 15 aa, synthetic construct
  REGION 1..15: note = peptide derived from viral capsid protein
GRAVFQAKKRVLEPF

SEQ ID NO: 1144 - protein, 15 aa, synthetic construct
  REGION 1..15: note = peptide derived from viral capsid protein
HPSPLMGGFGLKHPP

SEQ ID NO: 1145 - protein, 15 aa, synthetic construct
  REGION 1..15: note = peptide derived from viral capsid protein
KDKFFPMSGVMIFGK

SEQ ID NO: 1146 - protein, 15 aa, synthetic construct
  REGION 1..15: note = peptide derived from viral capsid protein
KHPPPQILIKNTPVP

SEQ ID NO: 1147 - protein, 15 aa, synthetic construct
  REGION 1..15: note = peptide derived from viral capsid protein
LMGGFGLKHPPPQIL

SEQ ID NO: 1148 - protein, 15 aa, synthetic construct
  REGION 1..15: note = peptide derived from viral capsid protein
NLQSSSTDPATGDVH

SEQ ID NO: 1149 - protein, 15 aa, synthetic construct
  REGION 1..15: note = peptide derived from viral capsid protein
PSPLMGGFGLKHPPP

SEQ ID NO: 1150 - protein, 15 aa, synthetic construct
  REGION 1..15: note = peptide derived from viral capsid protein
TDPATGDVHVMGALP

SEQ ID NO: 1151 - protein, 15 aa, synthetic construct
  REGION 1..15: note = peptide derived from viral capsid protein
LPPFPADVFMIPQYG

SEQ ID NO: 1152 - protein, 15 aa, synthetic construct
  REGION 1..15: note = peptide derived from viral capsid protein
FDFNRFHCHFSPRDW

SEQ ID NO: 1153 - protein, 15 aa, synthetic construct
  REGION 1..15: note = peptide derived from viral capsid protein
PPFPADVFMIPQYGY

SEQ ID NO: 1154 - protein, 15 aa, synthetic construct
  REGION 1..15: note = peptide derived from viral capsid protein
HYFGYSTPWGYFDFN

SEQ ID NO: 1155 - protein, 15 aa, synthetic construct
  REGION 1..15: note = peptide derived from viral capsid protein
CLPPFPADVFMIPQY

SEQ ID NO: 1156 - protein, 15 aa, synthetic construct
  REGION 1..15: note = peptide derived from viral capsid protein
NNLTSTVQVFSDSEY

SEQ ID NO: 1157 - protein, 15 aa, synthetic construct
  REGION 1..15: note = peptide derived from viral capsid protein
SQAVGRSSFYCLEYF

SEQ ID NO: 1158 - protein, 15 aa, synthetic construct
  REGION 1..15: note = peptide derived from viral capsid protein
DNLSEGIREWWDLKP

SEQ ID NO: 1159 - protein, 15 aa, synthetic construct
  REGION 1..15: note = peptide derived from viral capsid protein
LDRLMNPLIDQYLYY

SEQ ID NO: 1160 - protein, 15 aa, synthetic construct
  REGION 1..15: note = peptide derived from viral capsid protein
PFPADVFMIPQYGYL

SEQ ID NO: 1161 - protein, 15 aa, synthetic construct
  REGION 1..15: note = peptide derived from viral capsid protein
QAVGRSSFYCLEYFP

SEQ ID NO: 1162 - protein, 15 aa, synthetic construct
  REGION 1..15: note = peptide derived from viral capsid protein
QGCLPPFPADVFMIP

SEQ ID NO: 1163 - protein, 15 aa, synthetic construct
  REGION 1..15: note = peptide derived from viral capsid protein
GADGVGNASGNWHCD

SEQ ID NO: 1164 - protein, 15 aa, synthetic construct
  REGION 1..15: note = peptide derived from viral capsid protein
NLSEGIREWWDLKPG

SEQ ID NO: 1165 - protein, 15 aa, synthetic construct
  REGION 1..15: note = peptide derived from viral capsid protein
RSSFYCLEYFPSQML

SEQ ID NO: 1166 - protein, 15 aa, synthetic construct
  REGION 1..15: note = peptide derived from viral capsid protein
TDGHFHPSPLMGGFG

SEQ ID NO: 1167 - protein, 15 aa, synthetic construct
  REGION 1..15: note = peptide derived from viral capsid protein
VDFTVDNNGLYTEPR

SEQ ID NO: 1168 - protein, 15 aa, synthetic construct
  REGION 1..15: note = peptide derived from viral capsid protein
AADGYLPDWLEDNLS

SEQ ID NO: 1169 - protein, 15 aa, synthetic construct
  REGION 1..15: note = peptide derived from viral capsid protein
ANVDFTVDNNGLYTE

SEQ ID NO: 1170 - protein, 15 aa, synthetic construct
  REGION 1..15: note = peptide derived from viral capsid protein
FPADVFMIPQYGYLT

SEQ ID NO: 1171 - protein, 15 aa, synthetic construct
  REGION 1..15: note = peptide derived from viral capsid protein
LPDWLEDNLSEGIRE

SEQ ID NO: 1172 - protein, 15 aa, synthetic construct
  REGION 1..15: note = peptide derived from viral capsid protein
MAADGYLPDWLEDNL

SEQ ID NO: 1173 - protein, 15 aa, synthetic construct
  REGION 1..15: note = peptide derived from viral capsid protein
SNDNHYFGYSTPWGY

SEQ ID NO: 1174 - protein, 15 aa, synthetic construct
  REGION 1..15: note = peptide derived from viral capsid protein
VLPGYKYLGPFNGLD

SEQ ID NO: 1175 - protein, 15 aa, synthetic construct
  REGION 1..15: note = peptide derived from viral capsid protein
WGYFDFNRFHCHFSP

SEQ ID NO: 1176 - protein, 15 aa, synthetic construct
  REGION 1..15: note = peptide derived from viral capsid protein
EVTTNDGVTTIANNL

SEQ ID NO: 1177 - protein, 15 aa, synthetic construct
  REGION 1..15: note = peptide derived from viral capsid protein
GNWHCDSTWLGDRVI

SEQ ID NO: 1178 - protein, 15 aa, synthetic construct
  REGION 1..15: note = peptide derived from viral capsid protein
NDNHYFGYSTPWGYF

SEQ ID NO: 1179 - protein, 15 aa, synthetic construct
  REGION 1..15: note = peptide derived from viral capsid protein
PAEFSATKFASFITQ

SEQ ID NO: 1180 - protein, 15 aa, synthetic construct
  REGION 1..15: note = peptide derived from viral capsid protein
PYLRYNHADAEFQER

SEQ ID NO: 1181 - protein, 15 aa, synthetic construct
  REGION 1..15: note = peptide derived from viral capsid protein
YNHADAEFQERLQED

SEQ ID NO: 1182 - protein, 15 aa, synthetic construct
  REGION 1..15: note = peptide derived from viral capsid protein
DFNRFHCHFSPRDWQ

SEQ ID NO: 1183 - protein, 15 aa, synthetic construct
  REGION 1..15: note = peptide derived from viral capsid protein
DNPYLRYNHADAEFQ

SEQ ID NO: 1184 - protein, 15 aa, synthetic construct
  REGION 1..15: note = peptide derived from viral capsid protein
DRLMNPLIDQYLYYL

SEQ ID NO: 1185 - protein, 15 aa, synthetic construct
  REGION 1..15: note = peptide derived from viral capsid protein
GRSSFYCLEYFPSQM

SEQ ID NO: 1186 - protein, 15 aa, synthetic construct
  REGION 1..15: note = peptide derived from viral capsid protein
HQGCLPPFPADVFMI

SEQ ID NO: 1187 - protein, 15 aa, synthetic construct
  REGION 1..15: note = peptide derived from viral capsid protein
MGALPGMVWQDRDVY

SEQ ID NO: 1188 - protein, 15 aa, synthetic construct
  REGION 1..15: note = peptide derived from viral capsid protein
PHTDGHFHPSPLMGG

SEQ ID NO: 1189 - protein, 15 aa, synthetic construct
  REGION 1..15: note = peptide derived from viral capsid protein
QTGDSESVPDPQPLG

SEQ ID NO: 1190 - protein, 15 aa, synthetic construct
  REGION 1..15: note = peptide derived from viral capsid protein
SVEIEWELQKENSKR

SEQ ID NO: 1191 - protein, 15 aa, synthetic construct
  REGION 1..15: note = peptide derived from viral capsid protein
VGRSSFYCLEYFPSQ

SEQ ID NO: 1192 - protein, 15 aa, synthetic construct
  REGION 1..15: note = peptide derived from viral capsid protein
VQVFSDSEYQLPYVL

SEQ ID NO: 1193 - protein, 15 aa, synthetic construct
  REGION 1..15: note = peptide derived from viral capsid protein
YKYLGPFNGLDKGEP

SEQ ID NO: 1194 - protein, 15 aa, synthetic construct
  REGION 1..15: note = peptide derived from viral capsid protein
DGVGNASGNWHCDST

SEQ ID NO: 1195 - protein, 15 aa, synthetic construct
  REGION 1..15: note = peptide derived from viral capsid protein
GDNPYLRYNHADAEF

SEQ ID NO: 1196 - protein, 15 aa, synthetic construct
  REGION 1..15: note = peptide derived from viral capsid protein
GGGAPMADNNEGADG

SEQ ID NO: 1197 - protein, 15 aa, synthetic construct
  REGION 1..15: note = peptide derived from viral capsid protein
GQVSVEIEWELQKEN

SEQ ID NO: 1198 - protein, 15 aa, synthetic construct
  REGION 1..15: note = peptide derived from viral capsid protein
KGEPVNAADAAALEH

SEQ ID NO: 1199 - protein, 15 aa, synthetic construct
  REGION 1..15: note = peptide derived from viral capsid protein
LGPFNGLDKGEPVNA

SEQ ID NO: 1200 - protein, 15 aa, synthetic construct
  REGION 1..15: note = peptide derived from viral capsid protein
LTSTVQVFSDSEYQL

SEQ ID NO: 1201 - protein, 15 aa, synthetic construct
  REGION 1..15: note = peptide derived from viral capsid protein
NASGNWHCDSTWLGD

SEQ ID NO: 1202 - protein, 15 aa, synthetic construct
  REGION 1..15: note = peptide derived from viral capsid protein
NNGLYTEPRPIGTRY

SEQ ID NO: 1203 - protein, 15 aa, synthetic construct
  REGION 1..15: note = peptide derived from viral capsid protein
PDPQPLGEPPATPAA

SEQ ID NO: 1204 - protein, 15 aa, synthetic construct
  REGION 1..15: note = peptide derived from viral capsid protein
QSLDRLMNPLIDQYL

SEQ ID NO: 1205 - protein, 15 aa, synthetic construct
  REGION 1..15: note = peptide derived from viral capsid protein
SQSLDRLMNPLIDQY

SEQ ID NO: 1206 - protein, 15 aa, synthetic construct
  REGION 1..15: note = peptide derived from viral capsid protein
VEEGAKTAPGKKRPV

SEQ ID NO: 1207 - protein, 15 aa, synthetic construct
  REGION 1..15: note = peptide derived from viral capsid protein
ADAEFQERLQEDTSF

SEQ ID NO: 1208 - protein, 15 aa, synthetic construct
  REGION 1..15: note = peptide derived from viral capsid protein
ADVFMIPQYGYLTLN

SEQ ID NO: 1209 - protein, 15 aa, synthetic construct
  REGION 1..15: note = peptide derived from viral capsid protein
GMVWQDRDVYLQGPI

SEQ ID NO: 1210 - protein, 15 aa, synthetic construct
  REGION 1..15: note = peptide derived from viral capsid protein
IDQYLYYLNRTQNQS

SEQ ID NO: 1211 - protein, 15 aa, synthetic construct
  REGION 1..15: note = peptide derived from viral capsid protein
KLFNIQVKEVTTNDG

SEQ ID NO: 1212 - protein, 15 aa, synthetic construct
  REGION 1..15: note = peptide derived from viral capsid protein
KRPVEQSPQEPDSSS

SEQ ID NO: 1213 - protein, 15 aa, synthetic construct
  REGION 1..15: note = peptide derived from viral capsid protein
KTKTDNNNSNFTWTG

SEQ ID NO: 1214 - protein, 15 aa, synthetic construct
  REGION 1..15: note = peptide derived from viral capsid protein
KYLGPFNGLDKGEPV

SEQ ID NO: 1215 - protein, 15 aa, synthetic construct
  REGION 1..15: note = peptide derived from viral capsid protein
NAADAAALEHDKAYD

SEQ ID NO: 1216 - protein, 15 aa, synthetic construct
  REGION 1..15: note = peptide derived from viral capsid protein
NTPVPANPPAEFSAT

SEQ ID NO: 1217 - protein, 15 aa, synthetic construct
  REGION 1..15: note = peptide derived from viral capsid protein
PVNAADAAALEHDKA

SEQ ID NO: 1218 - protein, 15 aa, synthetic construct
  REGION 1..15: note = peptide derived from viral capsid protein
PWGYFDFNRFHCHFS

SEQ ID NO: 1219 - protein, 15 aa, synthetic construct
  REGION 1..15: note = peptide derived from viral capsid protein
QEDTSFGGNLGRAVF

SEQ ID NO: 1220 - protein, 15 aa, synthetic construct
  REGION 1..15: note = peptide derived from viral capsid protein
SAHQGCLPPFPADVF

SEQ ID NO: 1221 - protein, 15 aa, synthetic construct
  REGION 1..15: note = peptide derived from viral capsid protein
SGGGAPMADNNEGAD

SEQ ID NO: 1222 - protein, 15 aa, synthetic construct
  REGION 1..15: note = peptide derived from viral capsid protein
TGQVSVEIEWELQKE

SEQ ID NO: 1223 - protein, 15 aa, synthetic construct
  REGION 1..15: note = peptide derived from viral capsid protein
VFSDSEYQLPYVLGS

SEQ ID NO: 1224 - protein, 15 aa, synthetic construct
  REGION 1..15: note = peptide derived from viral capsid protein
VSKTKTDNNNSNFTW

SEQ ID NO: 1225 - protein, 15 aa, synthetic construct
  REGION 1..15: note = peptide derived from viral capsid protein
VWQDRDVYLQGPIWA

SEQ ID NO: 1226 - protein, 15 aa, synthetic construct
  REGION 1..15: note = peptide derived from viral capsid protein
YLGPFNGLDKGEPVN

SEQ ID NO: 1227 - protein, 15 aa, synthetic construct
  REGION 1..15: note = peptide derived from viral capsid protein
AALEHDKAYDQQLKA

SEQ ID NO: 1228 - protein, 15 aa, synthetic construct
  REGION 1..15: note = peptide derived from viral capsid protein
ADAAALEHDKAYDQQ

SEQ ID NO: 1229 - protein, 15 aa, synthetic construct
  REGION 1..15: note = peptide derived from viral capsid protein
AEFQERLQEDTSFGG

SEQ ID NO: 1230 - protein, 15 aa, synthetic construct
  REGION 1..15: note = peptide derived from viral capsid protein
AVGRSSFYCLEYFPS

SEQ ID NO: 1231 - protein, 15 aa, synthetic construct
  REGION 1..15: note = peptide derived from viral capsid protein
DDGRGLVLPGYKYLG

SEQ ID NO: 1232 - protein, 15 aa, synthetic construct
  REGION 1..15: note = peptide derived from viral capsid protein
DNNNSNFTWTGASKY

SEQ ID NO: 1233 - protein, 15 aa, synthetic construct
  REGION 1..15: note = peptide derived from viral capsid protein
ESIINPGTAMASHKD

SEQ ID NO: 1234 - protein, 15 aa, synthetic construct
  REGION 1..15: note = peptide derived from viral capsid protein
FGQTGDSESVPDPQP

SEQ ID NO: 1235 - protein, 15 aa, synthetic construct
  REGION 1..15: note = peptide derived from viral capsid protein
FNRFHCHFSPRDWQR

SEQ ID NO: 1236 - protein, 15 aa, synthetic construct
  REGION 1..15: note = peptide derived from viral capsid protein
FQERLQEDTSFGGNL

SEQ ID NO: 1237 - protein, 15 aa, synthetic construct
  REGION 1..15: note = peptide derived from viral capsid protein
FRPKRLNFKLFNIQV

SEQ ID NO: 1238 - protein, 15 aa, synthetic construct
  REGION 1..15: note = peptide derived from viral capsid protein
FSPRDWQRLINNNWG

SEQ ID NO: 1239 - protein, 15 aa, synthetic construct
  REGION 1..15: note = peptide derived from viral capsid protein
FTVDNNGLYTEPRPI

SEQ ID NO: 1240 - protein, 15 aa, synthetic construct
  REGION 1..15: note = peptide derived from viral capsid protein
FTWTGASKYNLNGRE

SEQ ID NO: 1241 - protein, 15 aa, synthetic construct
  REGION 1..15: note = peptide derived from viral capsid protein
GAPKPKANQQKQDDG

SEQ ID NO: 1242 - protein, 15 aa, synthetic construct
  REGION 1..15: note = peptide derived from viral capsid protein
GAPMADNNEGADGVG

SEQ ID NO: 1243 - protein, 15 aa, synthetic construct
  REGION 1..15: note = peptide derived from viral capsid protein
GASNTALDNVMITDE

SEQ ID NO: 1244 - protein, 15 aa, synthetic construct
  REGION 1..15: note = peptide derived from viral capsid protein
GHFHPSPLMGGFGLK

SEQ ID NO: 1245 - protein, 15 aa, synthetic construct
  REGION 1..15: note = peptide derived from viral capsid protein
GLDKGEPVNAADAAA

SEQ ID NO: 1246 - protein, 15 aa, synthetic construct
  REGION 1..15: note = peptide derived from viral capsid protein
GRGLVLPGYKYLGPF

SEQ ID NO: 1247 - protein, 15 aa, synthetic construct
  REGION 1..15: note = peptide derived from viral capsid protein
GYFDFNRFHCHFSPR

SEQ ID NO: 1248 - protein, 15 aa, synthetic construct
  REGION 1..15: note = peptide derived from viral capsid protein
GYKYLGPFNGLDKGE

SEQ ID NO: 1249 - protein, 15 aa, synthetic construct
  REGION 1..15: note = peptide derived from viral capsid protein
IEWELQKENSKRWNP

SEQ ID NO: 1250 - protein, 15 aa, synthetic construct
  REGION 1..15: note = peptide derived from viral capsid protein
IREWWDLKPGAPKPK

SEQ ID NO: 1251 - protein, 15 aa, synthetic construct
  REGION 1..15: note = peptide derived from viral capsid protein
KIPHTDGHFHPSPLM

SEQ ID NO: 1252 - protein, 15 aa, synthetic construct
  REGION 1..15: note = peptide derived from viral capsid protein
KKRPVEQSPQEPDSS

SEQ ID NO: 1253 - protein, 15 aa, synthetic construct
  REGION 1..15: note = peptide derived from viral capsid protein
KQDDGRGLVLPGYKY

SEQ ID NO: 1254 - protein, 15 aa, synthetic construct
  REGION 1..15: note = peptide derived from viral capsid protein
KTDNNNSNFTWTGAS

SEQ ID NO: 1255 - protein, 15 aa, synthetic construct
  REGION 1..15: note = peptide derived from viral capsid protein
LDKGEPVNAADAAAL

SEQ ID NO: 1256 - protein, 15 aa, synthetic construct
  REGION 1..15: note = peptide derived from viral capsid protein
LEHDKAYDQQLKAGD

SEQ ID NO: 1257 - protein, 15 aa, synthetic construct
  REGION 1..15: note = peptide derived from viral capsid protein
LEYFPSQMLRTGNNF

SEQ ID NO: 1258 - protein, 15 aa, synthetic construct
  REGION 1..15: note = peptide derived from viral capsid protein
LKPGAPKPKANQQKQ

SEQ ID NO: 1259 - protein, 15 aa, synthetic construct
  REGION 1..15: note = peptide derived from viral capsid protein
MASGGGAPMADNNEG

SEQ ID NO: 1260 - protein, 15 aa, synthetic construct
  REGION 1..15: note = peptide derived from viral capsid protein
NEGADGVGNASGNWH

SEQ ID NO: 1261 - protein, 15 aa, synthetic construct
  REGION 1..15: note = peptide derived from viral capsid protein
NGLDKGEPVNAADAA

SEQ ID NO: 1262 - protein, 15 aa, synthetic construct
  REGION 1..15: note = peptide derived from viral capsid protein
NGSQAVGRSSFYCLE

SEQ ID NO: 1263 - protein, 15 aa, synthetic construct
  REGION 1..15: note = peptide derived from viral capsid protein
NNSNFTWTGASKYNL

SEQ ID NO: 1264 - protein, 15 aa, synthetic construct
  REGION 1..15: note = peptide derived from viral capsid protein
NNWGFRPKRLNFKLF

SEQ ID NO: 1265 - protein, 15 aa, synthetic construct
  REGION 1..15: note = peptide derived from viral capsid protein
NPYLRYNHADAEFQE

SEQ ID NO: 1266 - protein, 15 aa, synthetic construct
  REGION 1..15: note = peptide derived from viral capsid protein
NVMITDEEEIKATNP

SEQ ID NO: 1267 - protein, 15 aa, synthetic construct
  REGION 1..15: note = peptide derived from viral capsid protein
NWGFRPKRLNFKLFN

SEQ ID NO: 1268 - protein, 15 aa, synthetic construct
  REGION 1..15: note = peptide derived from viral capsid protein
PADVFMIPQYGYLTL

SEQ ID NO: 1269 - protein, 15 aa, synthetic construct
  REGION 1..15: note = peptide derived from viral capsid protein
PDSSSGIGKTGQQPA

SEQ ID NO: 1270 - protein, 15 aa, synthetic construct
  REGION 1..15: note = peptide derived from viral capsid protein
PFNGLDKGEPVNAAD

SEQ ID NO: 1271 - protein, 15 aa, synthetic construct
  REGION 1..15: note = peptide derived from viral capsid protein
PGKKRPVEQSPQEPD

SEQ ID NO: 1272 - protein, 15 aa, synthetic construct
  REGION 1..15: note = peptide derived from viral capsid protein
PGYKYLGPFNGLDKG

SEQ ID NO: 1273 - protein, 15 aa, synthetic construct
  REGION 1..15: note = peptide derived from viral capsid protein
PIWAKIPHTDGHFHP

SEQ ID NO: 1274 - protein, 15 aa, synthetic construct
  REGION 1..15: note = peptide derived from viral capsid protein
PQILIKNTPVPANPP

SEQ ID NO: 1275 - protein, 15 aa, synthetic construct
  REGION 1..15: note = peptide derived from viral capsid protein
QEPDSSSGIGKTGQQ

SEQ ID NO: 1276 - protein, 15 aa, synthetic construct
  REGION 1..15: note = peptide derived from viral capsid protein
QISSASTGASNDNHY

SEQ ID NO: 1277 - protein, 15 aa, synthetic construct
  REGION 1..15: note = peptide derived from viral capsid protein
QQKQDDGRGLVLPGY

SEQ ID NO: 1278 - protein, 15 aa, synthetic construct
  REGION 1..15: note = peptide derived from viral capsid protein
REWWDLKPGAPKPKA

SEQ ID NO: 1279 - protein, 15 aa, synthetic construct
  REGION 1..15: note = peptide derived from viral capsid protein
RLMNPLIDQYLYYLN

SEQ ID NO: 1280 - protein, 15 aa, synthetic construct
  REGION 1..15: note = peptide derived from viral capsid protein
RLNFKLFNIQVKEVT

SEQ ID NO: 1281 - protein, 15 aa, synthetic construct
  REGION 1..15: note = peptide derived from viral capsid protein
SEYQLPYVLGSAHQG

SEQ ID NO: 1282 - protein, 15 aa, synthetic construct
  REGION 1..15: note = peptide derived from viral capsid protein
SGNWHCDSTWLGDRV

SEQ ID NO: 1283 - protein, 15 aa, synthetic construct
  REGION 1..15: note = peptide derived from viral capsid protein
SPRDWQRLINNNWGF

SEQ ID NO: 1284 - protein, 15 aa, synthetic construct
  REGION 1..15: note = peptide derived from viral capsid protein
STGQVSVEIEWELQK

SEQ ID NO: 1285 - protein, 15 aa, synthetic construct
  REGION 1..15: note = peptide derived from viral capsid protein
STPWGYFDFNRFHCH

SEQ ID NO: 1286 - protein, 15 aa, synthetic construct
  REGION 1..15: note = peptide derived from viral capsid protein
TALDNVMITDEEEIK

SEQ ID NO: 1287 - protein, 15 aa, synthetic construct
  REGION 1..15: note = peptide derived from viral capsid protein
TGDSESVPDPQPLGE

SEQ ID NO: 1288 - protein, 15 aa, synthetic construct
  REGION 1..15: note = peptide derived from viral capsid protein
VGNASGNWHCDSTWL

SEQ ID NO: 1289 - protein, 15 aa, synthetic construct
  REGION 1..15: note = peptide derived from viral capsid protein
WAKIPHTDGHFHPSP

SEQ ID NO: 1290 - protein, 15 aa, synthetic construct
  REGION 1..15: note = peptide derived from viral capsid protein
WELQKENSKRWNPEV

SEQ ID NO: 1291 - protein, 15 aa, synthetic construct
  REGION 1..15: note = peptide derived from viral capsid protein
YTEPRPIGTRYLTRP

SEQ ID NO: 1292 - protein, 15 aa, synthetic construct
  REGION 1..15: note = peptide derived from viral capsid protein
AGMSVQPKNWLPGPC

SEQ ID NO: 1293 - protein, 15 aa, synthetic construct
  REGION 1..15: note = peptide derived from viral capsid protein
AHSQSLDRLMNPLID

SEQ ID NO: 1294 - protein, 15 aa, synthetic construct
  REGION 1..15: note = peptide derived from viral capsid protein
APGKKRPVEQSPQEP

SEQ ID NO: 1295 - protein, 15 aa, synthetic construct
  REGION 1..15: note = peptide derived from viral capsid protein
APKPKANQQKQDDGR

SEQ ID NO: 1296 - protein, 15 aa, synthetic construct
  REGION 1..15: note = peptide derived from viral capsid protein
CDSTWLGDRVITTST

SEQ ID NO: 1297 - protein, 15 aa, synthetic construct
  REGION 1..15: note = peptide derived from viral capsid protein
CLEYFPSQMLRTGNN

SEQ ID NO: 1298 - protein, 15 aa, synthetic construct
  REGION 1..15: note = peptide derived from viral capsid protein
DGRGLVLPGYKYLGP

SEQ ID NO: 1299 - protein, 15 aa, synthetic construct
  REGION 1..15: note = peptide derived from viral capsid protein
DKAYDQQLKAGDNPY

SEQ ID NO: 1300 - protein, 15 aa, synthetic construct
  REGION 1..15: note = peptide derived from viral capsid protein
DQQLKAGDNPYLRYN

SEQ ID NO: 1301 - protein, 15 aa, synthetic construct
  REGION 1..15: note = peptide derived from viral capsid protein
DRDVYLQGPIWAKIP

SEQ ID NO: 1302 - protein, 15 aa, synthetic construct
  REGION 1..15: note = peptide derived from viral capsid protein
FPSQMLRTGNNFTFS

SEQ ID NO: 1303 - protein, 15 aa, synthetic construct
  REGION 1..15: note = peptide derived from viral capsid protein
GASKYNLNGRESIIN

SEQ ID NO: 1304 - protein, 15 aa, synthetic construct
  REGION 1..15: note = peptide derived from viral capsid protein
GDRVITTSTRTWALP

SEQ ID NO: 1305 - protein, 15 aa, synthetic construct
  REGION 1..15: note = peptide derived from viral capsid protein
GFRPKRLNFKLFNIQ

SEQ ID NO: 1306 - protein, 15 aa, synthetic construct
  REGION 1..15: note = peptide derived from viral capsid protein
GIREWWDLKPGAPKP

SEQ ID NO: 1307 - protein, 15 aa, synthetic construct
  REGION 1..15: note = peptide derived from viral capsid protein
GLVEEGAKTAPGKKR

SEQ ID NO: 1308 - protein, 15 aa, synthetic construct
  REGION 1..15: note = peptide derived from viral capsid protein
GLVLPGYKYLGPFNG

SEQ ID NO: 1309 - protein, 15 aa, synthetic construct
  REGION 1..15: note = peptide derived from viral capsid protein
GLYTEPRPIGTRYLT

SEQ ID NO: 1310 - protein, 15 aa, synthetic construct
  REGION 1..15: note = peptide derived from viral capsid protein
GNLGRAVFQAKKRVL

SEQ ID NO: 1311 - protein, 15 aa, synthetic construct
  REGION 1..15: note = peptide derived from viral capsid protein
GQTGDSESVPDPQPL

SEQ ID NO: 1312 - protein, 15 aa, synthetic construct
  REGION 1..15: note = peptide derived from viral capsid protein
GRESIINPGTAMASH

SEQ ID NO: 1313 - protein, 15 aa, synthetic construct
  REGION 1..15: note = peptide derived from viral capsid protein
HADAEFQERLQEDTS

SEQ ID NO: 1314 - protein, 15 aa, synthetic construct
  REGION 1..15: note = peptide derived from viral capsid protein
HFSPRDWQRLINNNW

SEQ ID NO: 1315 - protein, 15 aa, synthetic construct
  REGION 1..15: note = peptide derived from viral capsid protein
IKNTPVPANPPAEFS

SEQ ID NO: 1316 - protein, 15 aa, synthetic construct
  REGION 1..15: note = peptide derived from viral capsid protein
KANQQKQDDGRGLVL

SEQ ID NO: 1317 - protein, 15 aa, synthetic construct
  REGION 1..15: note = peptide derived from viral capsid protein
KPGAPKPKANQQKQD

SEQ ID NO: 1318 - protein, 15 aa, synthetic construct
  REGION 1..15: note = peptide derived from viral capsid protein
KPKANQQKQDDGRGL

SEQ ID NO: 1319 - protein, 15 aa, synthetic construct
  REGION 1..15: note = peptide derived from viral capsid protein
KRLNFGQTGDSESVP

SEQ ID NO: 1320 - protein, 15 aa, synthetic construct
  REGION 1..15: note = peptide derived from viral capsid protein
LDNVMITDEEEIKAT

SEQ ID NO: 1321 - protein, 15 aa, synthetic construct
  REGION 1..15: note = peptide derived from viral capsid protein
LGRAVFQAKKRVLEP

SEQ ID NO: 1322 - protein, 15 aa, synthetic construct
  REGION 1..15: note = peptide derived from viral capsid protein
LNFGQTGDSESVPDP

SEQ ID NO: 1323 - protein, 15 aa, synthetic construct
  REGION 1..15: note = peptide derived from viral capsid protein
LNGRESIINPGTAMA

SEQ ID NO: 1324 - protein, 15 aa, synthetic construct
  REGION 1..15: note = peptide derived from viral capsid protein
LNNGSQAVGRSSFYC

SEQ ID NO: 1325 - protein, 15 aa, synthetic construct
  REGION 1..15: note = peptide derived from viral capsid protein
LPGYKYLGPFNGLDK

SEQ ID NO: 1326 - protein, 15 aa, synthetic construct
  REGION 1..15: note = peptide derived from viral capsid protein
LPTYNNHLYKQISSA

SEQ ID NO: 1327 - protein, 15 aa, synthetic construct
  REGION 1..15: note = peptide derived from viral capsid protein
LRYNHADAEFQERLQ

SEQ ID NO: 1328 - protein, 15 aa, synthetic construct
  REGION 1..15: note = peptide derived from viral capsid protein
LVEEGAKTAPGKKRP

SEQ ID NO: 1329 - protein, 15 aa, synthetic construct
  REGION 1..15: note = peptide derived from viral capsid protein
MLRTGNNFTFSYTFE

SEQ ID NO: 1330 - protein, 15 aa, synthetic construct
  REGION 1..15: note = peptide derived from viral capsid protein
NFKLFNIQVKEVTTN

SEQ ID NO: 1331 - protein, 15 aa, synthetic construct
  REGION 1..15: note = peptide derived from viral capsid protein
NHADAEFQERLQEDT

SEQ ID NO: 1332 - protein, 15 aa, synthetic construct
  REGION 1..15: note = peptide derived from viral capsid protein
NLGRAVFQAKKRVLE

SEQ ID NO: 1333 - protein, 15 aa, synthetic construct
  REGION 1..15: note = peptide derived from viral capsid protein
PFHSSYAHSQSLDRL

SEQ ID NO: 1334 - protein, 15 aa, synthetic construct
  REGION 1..15: note = peptide derived from viral capsid protein
PKRLNFKLFNIQVKE

SEQ ID NO: 1335 - protein, 15 aa, synthetic construct
  REGION 1..15: note = peptide derived from viral capsid protein
PPATPAAVGPTTMAS

SEQ ID NO: 1336 - protein, 15 aa, synthetic construct
  REGION 1..15: note = peptide derived from viral capsid protein
PPPQILIKNTPVPAN

SEQ ID NO: 1337 - protein, 15 aa, synthetic construct
  REGION 1..15: note = peptide derived from viral capsid protein
PQYGYLTLNNGSQAV

SEQ ID NO: 1338 - protein, 15 aa, synthetic construct
  REGION 1..15: note = peptide derived from viral capsid protein
PRDWQRLINNNWGFR

SEQ ID NO: 1339 - protein, 15 aa, synthetic construct
  REGION 1..15: note = peptide derived from viral capsid protein
PYVLGSAHQGCLPPF

SEQ ID NO: 1340 - protein, 15 aa, synthetic construct
  REGION 1..15: note = peptide derived from viral capsid protein
QDDGRGLVLPGYKYL

SEQ ID NO: 1341 - protein, 15 aa, synthetic construct
  REGION 1..15: note = peptide derived from viral capsid protein
QDRDVYLQGPIWAKI

SEQ ID NO: 1342 - protein, 15 aa, synthetic construct
  REGION 1..15: note = peptide derived from viral capsid protein
QERLQEDTSFGGNLG

SEQ ID NO: 1343 - protein, 15 aa, synthetic construct
  REGION 1..15: note = peptide derived from viral capsid protein
QRLINNNWGFRPKRL

SEQ ID NO: 1344 - protein, 15 aa, synthetic construct
  REGION 1..15: note = peptide derived from viral capsid protein
QYLYYLNRTQNQSGS

SEQ ID NO: 1345 - protein, 15 aa, synthetic construct
  REGION 1..15: note = peptide derived from viral capsid protein
RDVYLQGPIWAKIPH

SEQ ID NO: 1346 - protein, 15 aa, synthetic construct
  REGION 1..15: note = peptide derived from viral capsid protein
RDWQRLINNNWGFRP

SEQ ID NO: 1347 - protein, 15 aa, synthetic construct
  REGION 1..15: note = peptide derived from viral capsid protein
RGSPAGMSVQPKNWL

SEQ ID NO: 1348 - protein, 15 aa, synthetic construct
  REGION 1..15: note = peptide derived from viral capsid protein
RLNFGQTGDSESVPD

SEQ ID NO: 1349 - protein, 15 aa, synthetic construct
  REGION 1..15: note = peptide derived from viral capsid protein
RLQEDTSFGGNLGRA

SEQ ID NO: 1350 - protein, 15 aa, synthetic construct
  REGION 1..15: note = peptide derived from viral capsid protein
RQQRVSKTKTDNNNS

SEQ ID NO: 1351 - protein, 15 aa, synthetic construct
  REGION 1..15: note = peptide derived from viral capsid protein
SEGIREWWDLKPGAP

SEQ ID NO: 1352 - protein, 15 aa, synthetic construct
  REGION 1..15: note = peptide derived from viral capsid protein
SKYNLNGRESIINPG

SEQ ID NO: 1353 - protein, 15 aa, synthetic construct
  REGION 1..15: note = peptide derived from viral capsid protein
SNFTWTGASKYNLNG

SEQ ID NO: 1354 - protein, 15 aa, synthetic construct
  REGION 1..15: note = peptide derived from viral capsid protein
SSFYCLEYFPSQMLR

SEQ ID NO: 1355 - protein, 15 aa, synthetic construct
  REGION 1..15: note = peptide derived from viral capsid protein
STRTWALPTYNNHLY

SEQ ID NO: 1356 - protein, 15 aa, synthetic construct
  REGION 1..15: note = peptide derived from viral capsid protein
TNPVATERFGTVAVN

SEQ ID NO: 1357 - protein, 15 aa, synthetic construct
  REGION 1..15: note = peptide derived from viral capsid protein
TSTRTWALPTYNNHL

SEQ ID NO: 1358 - protein, 15 aa, synthetic construct
  REGION 1..15: note = peptide derived from viral capsid protein
TTMASGGGAPMADNN

SEQ ID NO: 1359 - protein, 15 aa, synthetic construct
  REGION 1..15: note = peptide derived from viral capsid protein
TWLGDRVITTSTRTW

SEQ ID NO: 1360 - protein, 15 aa, synthetic construct
  REGION 1..15: note = peptide derived from viral capsid protein
TYNNHLYKQISSAST

SEQ ID NO: 1361 - protein, 15 aa, synthetic construct
  REGION 1..15: note = peptide derived from viral capsid protein
VDNNGLYTEPRPIGT

SEQ ID NO: 1362 - protein, 15 aa, synthetic construct
  REGION 1..15: note = peptide derived from viral capsid protein
VFMIPQYGYLTLNNG

SEQ ID NO: 1363 - protein, 15 aa, synthetic construct
  REGION 1..15: note = peptide derived from viral capsid protein
VNAADAAALEHDKAY

SEQ ID NO: 1364 - protein, 15 aa, synthetic construct
  REGION 1..15: note = peptide derived from viral capsid protein
VPFHSSYAHSQSLDR

SEQ ID NO: 1365 - protein, 15 aa, synthetic construct
  REGION 1..15: note = peptide derived from viral capsid protein
VQYTSNYAKSANVDF

SEQ ID NO: 1366 - protein, 15 aa, synthetic construct
  REGION 1..15: note = peptide derived from viral capsid protein
WGFRPKRLNFKLFNI

SEQ ID NO: 1367 - protein, 15 aa, synthetic construct
  REGION 1..15: note = peptide derived from viral capsid protein
WLGDRVITTSTRTWA

SEQ ID NO: 1368 - protein, 15 aa, synthetic construct
  REGION 1..15: note = peptide derived from viral capsid protein
WQDRDVYLQGPIWAK

SEQ ID NO: 1369 - protein, 15 aa, synthetic construct
  REGION 1..15: note = peptide derived from viral capsid protein
WQRLINNNWGFRPKR

SEQ ID NO: 1370 - protein, 15 aa, synthetic construct
  REGION 1..15: note = peptide derived from viral capsid protein
YAKSANVDFTVDNNG

SEQ ID NO: 1371 - protein, 15 aa, synthetic construct
  REGION 1..15: note = peptide derived from viral capsid protein
YGYLTLNNGSQAVGR

SEQ ID NO: 1372 - protein, 15 aa, synthetic construct
  REGION 1..15: note = peptide derived from viral capsid protein
YLNRTQNQSGSAQNK

SEQ ID NO: 1373 - protein, 15 aa, synthetic construct
  REGION 1..15: note = peptide derived from viral capsid protein
YLRYNHADAEFQERL

SEQ ID NO: 1374 - protein, 15 aa, synthetic construct
  REGION 1..15: note = peptide derived from viral capsid protein
YNLNGRESIINPGTA

SEQ ID NO: 1375 - protein, 15 aa, synthetic construct
  REGION 1..15: note = peptide derived from viral capsid protein
FQFSYTFEDVPFHSS

SEQ ID NO: 1376 - protein, 15 aa, synthetic construct
  REGION 1..15: note = peptide derived from viral capsid protein
QGALPGMVWQDRDVY

SEQ ID NO: 1377 - protein, 15 aa, synthetic construct
  REGION 1..15: note = peptide derived from viral capsid protein
NDQGALPGMVWQDRD

SEQ ID NO: 1378 - protein, 15 aa, synthetic construct
  REGION 1..15: note = peptide derived from viral capsid protein
EIRTTNPVATEQYGT

SEQ ID NO: 1379 - protein, 15 aa, synthetic construct
  REGION 1..15: note = peptide derived from viral capsid protein
EQYGTVANNLQSSNT

SEQ ID NO: 1380 - protein, 15 aa, synthetic construct
  REGION 1..15: note = peptide derived from viral capsid protein
PGNGLDKGEPVNEAD

SEQ ID NO: 1381 - protein, 15 aa, synthetic construct
  REGION 1..15: note = peptide derived from viral capsid protein
GEPPAAPTSLGSNTM

SEQ ID NO: 1382 - protein, 15 aa, synthetic construct
  REGION 1..15: note = peptide derived from viral capsid protein
GSNTMASGGGAPMAD

SEQ ID NO: 1383 - protein, 15 aa, synthetic construct
  REGION 1..15: note = peptide derived from viral capsid protein
NTMASGGGAPMADNN

SEQ ID NO: 1384 - protein, 15 aa, synthetic construct
  REGION 1..15: note = peptide derived from viral capsid protein
PTTRTVNDQGALPGM

SEQ ID NO: 1385 - protein, 15 aa, synthetic construct
  REGION 1..15: note = peptide derived from viral capsid protein
LGPGNGLDKGEPVNE

SEQ ID NO: 1386 - protein, 15 aa, synthetic construct
  REGION 1..15: note = peptide derived from viral capsid protein
PDPQPLGEPPAAPTS

SEQ ID NO: 1387 - protein, 15 aa, synthetic construct
  REGION 1..15: note = peptide derived from viral capsid protein
PVATEQYGTVANNLQ

SEQ ID NO: 1388 - protein, 15 aa, synthetic construct
  REGION 1..15: note = peptide derived from viral capsid protein
QSMSLQARNWLPGPC

SEQ ID NO: 1389 - protein, 15 aa, synthetic construct
  REGION 1..15: note = peptide derived from viral capsid protein
SGVGKSGKQPARKRL

SEQ ID NO: 1390 - protein, 15 aa, synthetic construct
  REGION 1..15: note = peptide derived from viral capsid protein
TFSPAKFASFITQYS

SEQ ID NO: 1391 - protein, 15 aa, synthetic construct
  REGION 1..15: note = peptide derived from viral capsid protein
TVNDQGALPGMVWQD

SEQ ID NO: 1392 - protein, 15 aa, synthetic construct
  REGION 1..15: note = peptide derived from viral capsid protein
VGNSSGNWHCDSQWL

SEQ ID NO: 1393 - protein, 15 aa, synthetic construct
  REGION 1..15: note = peptide derived from viral capsid protein
EWWALKPGVPQPKAN

SEQ ID NO: 1394 - protein, 15 aa, synthetic construct
  REGION 1..15: note = peptide derived from viral capsid protein
FPWTAASKYHLNGRD

SEQ ID NO: 1395 - protein, 15 aa, synthetic construct
  REGION 1..15: note = peptide derived from viral capsid protein
LINNNWGFRPKKLSF

SEQ ID NO: 1396 - protein, 15 aa, synthetic construct
  REGION 1..15: note = peptide derived from viral capsid protein
MGGFGLKHPPPQIMI

SEQ ID NO: 1397 - protein, 15 aa, synthetic construct
  REGION 1..15: note = peptide derived from viral capsid protein
NPPTTFSPAKFASFI

SEQ ID NO: 1398 - protein, 15 aa, synthetic construct
  REGION 1..15: note = peptide derived from viral capsid protein
NWGFRPKKLSFKLFN

SEQ ID NO: 1399 - protein, 15 aa, synthetic construct
  REGION 1..15: note = peptide derived from viral capsid protein
TNPVATEQYGTVANN

SEQ ID NO: 1400 - protein, 15 aa, synthetic construct
  REGION 1..15: note = peptide derived from viral capsid protein
AAKTAPGKKRPVDQS

SEQ ID NO: 1401 - protein, 15 aa, synthetic construct
  REGION 1..15: note = peptide derived from viral capsid protein
AAPTSLGSNTMASGG

SEQ ID NO: 1402 - protein, 15 aa, synthetic construct
  REGION 1..15: note = peptide derived from viral capsid protein
AASKYHLNGRDSLVN

SEQ ID NO: 1403 - protein, 15 aa, synthetic construct
  REGION 1..15: note = peptide derived from viral capsid protein
ANNLQSSNTAPTTRT

SEQ ID NO: 1404 - protein, 15 aa, synthetic construct
  REGION 1..15: note = peptide derived from viral capsid protein
DQSPQEPDSSSGVGK

SEQ ID NO: 1405 - protein, 15 aa, synthetic construct
  REGION 1..15: note = peptide derived from viral capsid protein
EGIREWWALKPGVPQ

SEQ ID NO: 1406 - protein, 15 aa, synthetic construct
  REGION 1..15: note = peptide derived from viral capsid protein
GKQPARKRLNFGQTG

SEQ ID NO: 1407 - protein, 15 aa, synthetic construct
  REGION 1..15: note = peptide derived from viral capsid protein
GPQSMSLQARNWLPG

SEQ ID NO: 1408 - protein, 15 aa, synthetic construct
  REGION 1..15: note = peptide derived from viral capsid protein
GRAVFQAKKRILEPL

SEQ ID NO: 1409 - protein, 15 aa, synthetic construct
  REGION 1..15: note = peptide derived from viral capsid protein
IKNTPVPANPPTTFS

SEQ ID NO: 1410 - protein, 15 aa, synthetic construct
  REGION 1..15: note = peptide derived from viral capsid protein
IREWWALKPGVPQPK

SEQ ID NO: 1411 - protein, 15 aa, synthetic construct
  REGION 1..15: note = peptide derived from viral capsid protein
KRILEPLGLVEEAAK

SEQ ID NO: 1412 - protein, 15 aa, synthetic construct
  REGION 1..15: note = peptide derived from viral capsid protein
LKPGVPQPKANQQHQ

SEQ ID NO: 1413 - protein, 15 aa, synthetic construct
  REGION 1..15: note = peptide derived from viral capsid protein
NLGRAVFQAKKRILE

SEQ ID NO: 1414 - protein, 15 aa, synthetic construct
  REGION 1..15: note = peptide derived from viral capsid protein
PANPPTTFSPAKFAS

SEQ ID NO: 1415 - protein, 15 aa, synthetic construct
  REGION 1..15: note = peptide derived from viral capsid protein
PQIMIKNTPVPANPP

SEQ ID NO: 1416 - protein, 15 aa, synthetic construct
  REGION 1..15: note = peptide derived from viral capsid protein
QEPDSSSGVGKSGKQ

SEQ ID NO: 1417 - protein, 15 aa, synthetic construct
  REGION 1..15: note = peptide derived from viral capsid protein
SKYHLNGRDSLVNPG

SEQ ID NO: 1418 - protein, 15 aa, synthetic construct
  REGION 1..15: note = peptide derived from viral capsid protein
SLGSNTMASGGGAPM

SEQ ID NO: 1419 - protein, 15 aa, synthetic construct
  REGION 1..15: note = peptide derived from viral capsid protein
SNTAPTTRTVNDQGA

SEQ ID NO: 1420 - protein, 15 aa, synthetic construct
  REGION 1..15: note = peptide derived from viral capsid protein
TAPTTRTVNDQGALP

SEQ ID NO: 1421 - protein, 15 aa, synthetic construct
  REGION 1..15: note = peptide derived from viral capsid protein
HKDDEEKFFPMHGNL

SEQ ID NO: 1422 - protein, 15 aa, synthetic construct
  REGION 1..15: note = peptide derived from viral capsid protein
ASHKDDEEKFFPMHG

SEQ ID NO: 1423 - protein, 15 aa, synthetic construct
  REGION 1..15: note = peptide derived from viral capsid protein
KFFPMHGNLIFGKEG

SEQ ID NO: 1424 - protein, 15 aa, synthetic construct
  REGION 1..15: note = peptide derived from viral capsid protein
NVMITDEEEIRTTNP

SEQ ID NO: 1425 - protein, 15 aa, synthetic construct
  REGION 1..15: note = peptide derived from viral capsid protein
AMASHKDDEEKFFPM

SEQ ID NO: 1426 - protein, 15 aa, synthetic construct
  REGION 1..15: note = peptide derived from viral capsid protein
LDNVMITDEEEIRTT

SEQ ID NO: 1427 - protein, 15 aa, synthetic construct
  REGION 1..15: note = peptide derived from viral capsid protein
FGKEGTTASNAELDN

SEQ ID NO: 1428 - protein, 15 aa, synthetic construct
  REGION 1..15: note = peptide derived from viral capsid protein
KTANDNNNSNFPWTA

SEQ ID NO: 1429 - protein, 15 aa, synthetic construct
  REGION 1..15: note = peptide derived from viral capsid protein
RQQRLSKTANDNNNS

SEQ ID NO: 1430 - protein, 15 aa, synthetic construct
  REGION 1..15: note = peptide derived from viral capsid protein
DNNNSNFPWTAASKY

SEQ ID NO: 1431 - protein, 15 aa, synthetic construct
  REGION 1..15: note = peptide derived from viral capsid protein
FPMHGNLIFGKEGTT

SEQ ID NO: 1432 - protein, 15 aa, synthetic construct
  REGION 1..15: note = peptide derived from viral capsid protein
GNLIFGKEGTTASNA

SEQ ID NO: 1433 - protein, 15 aa, synthetic construct
  REGION 1..15: note = peptide derived from viral capsid protein
KEGTTASNAELDNVM

SEQ ID NO: 1434 - protein, 15 aa, synthetic construct
  REGION 1..15: note = peptide derived from viral capsid protein
LSKTANDNNNSNFPW

SEQ ID NO: 1435 - protein, 15 aa, synthetic construct
  REGION 1..15: note = peptide derived from viral capsid protein
QGTTSGTTNQSRLLF

SEQ ID NO: 1436 - protein, 15 aa, synthetic construct
  REGION 1..15: note = peptide derived from viral capsid protein
TASNAELDNVMITDE

SEQ ID NO: 1437 - protein, 15 aa, synthetic construct
  REGION 1..15: note = peptide derived from viral capsid protein
YLYYLNRTQGTTSGT

SEQ ID NO: 1438 - protein, 15 aa, synthetic construct
  REGION 1..15: note = peptide derived from viral capsid protein
YYLNRTQGTTSGTTN

SEQ ID NO: 1439 - protein, 15 aa, synthetic construct
  REGION 1..15: note = peptide derived from viral capsid protein
QRLINNNWGFRPKKL

SEQ ID NO: 1440 - protein, 15 aa, synthetic construct
  REGION 1..15: note = peptide derived from viral capsid protein
DGNFHPSPLMGGFGM

SEQ ID NO: 1441 - protein, 15 aa, synthetic construct
  REGION 1..15: note = peptide derived from viral capsid protein
GEDRFFPLSGSLIFG

SEQ ID NO: 1442 - protein, 15 aa, synthetic construct
  REGION 1..15: note = peptide derived from viral capsid protein
LEDNLSEGIREWWAL

SEQ ID NO: 1443 - protein, 15 aa, synthetic construct
  REGION 1..15: note = peptide derived from viral capsid protein
NDNAYFGYSTPWGYF

SEQ ID NO: 1444 - protein, 15 aa, synthetic construct
  REGION 1..15: note = peptide derived from viral capsid protein
NFQFSYEFENVPFHS

SEQ ID NO: 1445 - protein, 15 aa, synthetic construct
  REGION 1..15: note = peptide derived from viral capsid protein
NNLTSTVQVFTDSDY

SEQ ID NO: 1446 - protein, 15 aa, synthetic construct
  REGION 1..15: note = peptide derived from viral capsid protein
QGILPGMVWQDRDVY

SEQ ID NO: 1447 - protein, 15 aa, synthetic construct
  REGION 1..15: note = peptide derived from viral capsid protein
EGVYSEPRPIGTRYL

SEQ ID NO: 1448 - protein, 15 aa, synthetic construct
  REGION 1..15: note = peptide derived from viral capsid protein
GILPGMVWQDRDVYL

SEQ ID NO: 1449 - protein, 15 aa, synthetic construct
  REGION 1..15: note = peptide derived from viral capsid protein
NSEFAWPGASSWALN

SEQ ID NO: 1450 - protein, 15 aa, synthetic construct
  REGION 1..15: note = peptide derived from viral capsid protein
PYLKYNHADAEFQER

SEQ ID NO: 1451 - protein, 15 aa, synthetic construct
  REGION 1..15: note = peptide derived from viral capsid protein
KEGEDRFFPLSGSLI

SEQ ID NO: 1452 - protein, 15 aa, synthetic construct
  REGION 1..15: note = peptide derived from viral capsid protein
PGPAMASHKEGEDRF

SEQ ID NO: 1453 - protein, 15 aa, synthetic construct
  REGION 1..15: note = peptide derived from viral capsid protein
QAKKRLLEPLGLVEE

SEQ ID NO: 1454 - protein, 15 aa, synthetic construct
  REGION 1..15: note = peptide derived from viral capsid protein
QNQGILPGMVWQDRD

SEQ ID NO: 1455 - protein, 15 aa, synthetic construct
  REGION 1..15: note = peptide derived from viral capsid protein
EGADGVGSSSGNWHC

SEQ ID NO: 1456 - protein, 15 aa, synthetic construct
  REGION 1..15: note = peptide derived from viral capsid protein
HEGCLPPFPADVFMI

SEQ ID NO: 1457 - protein, 15 aa, synthetic construct
  REGION 1..15: note = peptide derived from viral capsid protein
LVEEAAKTAPGKKRP

SEQ ID NO: 1458 - protein, 15 aa, synthetic construct
  REGION 1..15: note = peptide derived from viral capsid protein
NQGILPGMVWQDRDV

SEQ ID NO: 1459 - protein, 15 aa, synthetic construct
  REGION 1..15: note = peptide derived from viral capsid protein
EVTDNNGVKTIANNL

SEQ ID NO: 1460 - protein, 15 aa, synthetic construct
  REGION 1..15: note = peptide derived from viral capsid protein
GADGVGSSSGNWHCD

SEQ ID NO: 1461 - protein, 15 aa, synthetic construct
  REGION 1..15: note = peptide derived from viral capsid protein
LTSTVQVFTDSDYQL

SEQ ID NO: 1462 - protein, 15 aa, synthetic construct
  REGION 1..15: note = peptide derived from viral capsid protein
NEGADGVGSSSGNWH

SEQ ID NO: 1463 - protein, 15 aa, synthetic construct
  REGION 1..15: note = peptide derived from viral capsid protein
NPVATESYGQVATNH

SEQ ID NO: 1464 - protein, 15 aa, synthetic construct
  REGION 1..15: note = peptide derived from viral capsid protein
NVDADKVMITNEEEI

SEQ ID NO: 1465 - protein, 15 aa, synthetic construct
  REGION 1..15: note = peptide derived from viral capsid protein
PVADNNEGADGVGSS

SEQ ID NO: 1466 - protein, 15 aa, synthetic construct
  REGION 1..15: note = peptide derived from viral capsid protein
SAHEGCLPPFPADVF

SEQ ID NO: 1467 - protein, 15 aa, synthetic construct
  REGION 1..15: note = peptide derived from viral capsid protein
TGDTESVPDPQPIGE

SEQ ID NO: 1468 - protein, 15 aa, synthetic construct
  REGION 1..15: note = peptide derived from viral capsid protein
TMASGGGAPVADNNE

SEQ ID NO: 1469 - protein, 15 aa, synthetic construct
  REGION 1..15: note = peptide derived from viral capsid protein
VEQSPQEPDSSAGIG

SEQ ID NO: 1470 - protein, 15 aa, synthetic construct
  REGION 1..15: note = peptide derived from viral capsid protein
VQVFTDSDYQLPYVL

SEQ ID NO: 1471 - protein, 15 aa, synthetic construct
  REGION 1..15: note = peptide derived from viral capsid protein
EPLGLVEEAAKTAPG

SEQ ID NO: 1472 - protein, 15 aa, synthetic construct
  REGION 1..15: note = peptide derived from viral capsid protein
EPPAAPSGVGSLTMA

SEQ ID NO: 1473 - protein, 15 aa, synthetic construct
  REGION 1..15: note = peptide derived from viral capsid protein
FNKDKLNSFITQYST

SEQ ID NO: 1474 - protein, 15 aa, synthetic construct
  REGION 1..15: note = peptide derived from viral capsid protein
GAPVADNNEGADGVG

SEQ ID NO: 1475 - protein, 15 aa, synthetic construct
  REGION 1..15: note = peptide derived from viral capsid protein
GGGAPVADNNEGADG

SEQ ID NO: 1476 - protein, 15 aa, synthetic construct
  REGION 1..15: note = peptide derived from viral capsid protein
IFGKQGTGRDNVDAD

SEQ ID NO: 1477 - protein, 15 aa, synthetic construct
  REGION 1..15: note = peptide derived from viral capsid protein
ILPGMVWQDRDVYLQ

SEQ ID NO: 1478 - protein, 15 aa, synthetic construct
  REGION 1..15: note = peptide derived from viral capsid protein
MGGFGMKHPPPQILI

SEQ ID NO: 1479 - protein, 15 aa, synthetic construct
  REGION 1..15: note = peptide derived from viral capsid protein
PPQILIKNTPVPADP

SEQ ID NO: 1480 - protein, 15 aa, synthetic construct
  REGION 1..15: note = peptide derived from viral capsid protein
RAVFQAKKRLLEPLG

SEQ ID NO: 1481 - protein, 15 aa, synthetic construct
  REGION 1..15: note = peptide derived from viral capsid protein
RDNVDADKVMITNEE

SEQ ID NO: 1482 - protein, 15 aa, synthetic construct
  REGION 1..15: note = peptide derived from viral capsid protein
SNNVEFAVNTEGVYS

SEQ ID NO: 1483 - protein, 15 aa, synthetic construct
  REGION 1..15: note = peptide derived from viral capsid protein
TEGVYSEPRPIGTRY

SEQ ID NO: 1484 - protein, 15 aa, synthetic construct
  REGION 1..15: note = peptide derived from viral capsid protein
TSGGSSNDNAYFGYS

SEQ ID NO: 1485 - protein, 15 aa, synthetic construct
  REGION 1..15: note = peptide derived from viral capsid protein
TVTQNNNSEFAWPGA

SEQ ID NO: 1486 - protein, 15 aa, synthetic construct
  REGION 1..15: note = peptide derived from viral capsid protein
VLPGYKYLGPGNGLD

SEQ ID NO: 1487 - protein, 15 aa, synthetic construct
  REGION 1..15: note = peptide derived from viral capsid protein
ADPPTAFNKDKLNSF

SEQ ID NO: 1488 - protein, 15 aa, synthetic construct
  REGION 1..15: note = peptide derived from viral capsid protein
ALNGRNSLMNPGPAM

SEQ ID NO: 1489 - protein, 15 aa, synthetic construct
  REGION 1..15: note = peptide derived from viral capsid protein
APSGVGSLTMASGGG

SEQ ID NO: 1490 - protein, 15 aa, synthetic construct
  REGION 1..15: note = peptide derived from viral capsid protein
DNLSEGIREWWALKP

SEQ ID NO: 1491 - protein, 15 aa, synthetic construct
  REGION 1..15: note = peptide derived from viral capsid protein
DPPTAFNKDKLNSFI

SEQ ID NO: 1492 - protein, 15 aa, synthetic construct
  REGION 1..15: note = peptide derived from viral capsid protein
DSQWLGDRVITTSTR

SEQ ID NO: 1493 - protein, 15 aa, synthetic construct
  REGION 1..15: note = peptide derived from viral capsid protein
DSSAGIGKSGAQPAK

SEQ ID NO: 1494 - protein, 15 aa, synthetic construct
  REGION 1..15: note = peptide derived from viral capsid protein
DVFMIPQYGYLTLND

SEQ ID NO: 1495 - protein, 15 aa, synthetic construct
  REGION 1..15: note = peptide derived from viral capsid protein
GIGKSGAQPAKKRLN

SEQ ID NO: 1496 - protein, 15 aa, synthetic construct
  REGION 1..15: note = peptide derived from viral capsid protein
GKQGTGRDNVDADKV

SEQ ID NO: 1497 - protein, 15 aa, synthetic construct
  REGION 1..15: note = peptide derived from viral capsid protein
GNFHPSPLMGGFGMK

SEQ ID NO: 1498 - protein, 15 aa, synthetic construct
  REGION 1..15: note = peptide derived from viral capsid protein
GVGSSSGNWHCDSQW

SEQ ID NO: 1499 - protein, 15 aa, synthetic construct
  REGION 1..15: note = peptide derived from viral capsid protein
ISNSTSGGSSNDNAY

SEQ ID NO: 1500 - protein, 15 aa, synthetic construct
  REGION 1..15: note = peptide derived from viral capsid protein
KLNSFITQYSTGQVS

SEQ ID NO: 1501 - protein, 15 aa, synthetic construct
  REGION 1..15: note = peptide derived from viral capsid protein
KNTPVPADPPTAFNK

SEQ ID NO: 1502 - protein, 15 aa, synthetic construct
  REGION 1..15: note = peptide derived from viral capsid protein
KYLGPGNGLDKGEPV

SEQ ID NO: 1503 - protein, 15 aa, synthetic construct
  REGION 1..15: note = peptide derived from viral capsid protein
LGRAVFQAKKRLLEP

SEQ ID NO: 1504 - protein, 15 aa, synthetic construct
  REGION 1..15: note = peptide derived from viral capsid protein
LGSAHEGCLPPFPAD

SEQ ID NO: 1505 - protein, 15 aa, synthetic construct
  REGION 1..15: note = peptide derived from viral capsid protein
MNPGPAMASHKEGED

SEQ ID NO: 1506 - protein, 15 aa, synthetic construct
  REGION 1..15: note = peptide derived from viral capsid protein
NMAVQGRNYIPGPSY

SEQ ID NO: 1507 - protein, 15 aa, synthetic construct
  REGION 1..15: note = peptide derived from viral capsid protein
NNEGADGVGSSSGNW

SEQ ID NO: 1508 - protein, 15 aa, synthetic construct
  REGION 1..15: note = peptide derived from viral capsid protein
NWHCDSQWLGDRVIT

SEQ ID NO: 1509 - protein, 15 aa, synthetic construct
  REGION 1..15: note = peptide derived from viral capsid protein
PAMASHKEGEDRFFP

SEQ ID NO: 1510 - protein, 15 aa, synthetic construct
  REGION 1..15: note = peptide derived from viral capsid protein
PEIQYTSNYYKSNNV

SEQ ID NO: 1511 - protein, 15 aa, synthetic construct
  REGION 1..15: note = peptide derived from viral capsid protein
QQRVSTTVTQNNNSE

SEQ ID NO: 1512 - protein, 15 aa, synthetic construct
  REGION 1..15: note = peptide derived from viral capsid protein
RLLEPLGLVEEAAKT

SEQ ID NO: 1513 - protein, 15 aa, synthetic construct
  REGION 1..15: note = peptide derived from viral capsid protein
RPVEQSPQEPDSSAG

SEQ ID NO: 1514 - protein, 15 aa, synthetic construct
  REGION 1..15: note = peptide derived from viral capsid protein
TAFNKDKLNSFITQY

SEQ ID NO: 1515 - protein, 15 aa, synthetic construct
  REGION 1..15: note = peptide derived from viral capsid protein
TGWVQNQGILPGMVW

SEQ ID NO: 1516 - protein, 15 aa, synthetic construct
  REGION 1..15: note = peptide derived from viral capsid protein
TQNNNSEFAWPGASS

SEQ ID NO: 1517 - protein, 15 aa, synthetic construct
  REGION 1..15: note = peptide derived from viral capsid protein
VKEVTDNNGVKTIAN

SEQ ID NO: 1518 - protein, 15 aa, synthetic construct
  REGION 1..15: note = peptide derived from viral capsid protein
VPDPQPIGEPPAAPS

SEQ ID NO: 1519 - protein, 15 aa, synthetic construct
  REGION 1..15: note = peptide derived from viral capsid protein
VQNQGILPGMVWQDR

SEQ ID NO: 1520 - protein, 15 aa, synthetic construct
  REGION 1..15: note = peptide derived from viral capsid protein
YFPSQMLRTGNNFQF

SEQ ID NO: 1521 - protein, 15 aa, synthetic construct
  REGION 1..15: note = peptide derived from viral capsid protein
YVLGSAHEGCLPPFP

SEQ ID NO: 1522 - protein, 15 aa, synthetic construct
  REGION 1..15: note = peptide derived from viral capsid protein
ADGVGSSSGNWHCDS

SEQ ID NO: 1523 - protein, 15 aa, synthetic construct
  REGION 1..15: note = peptide derived from viral capsid protein
ANQQHQDNARGLVLP

SEQ ID NO: 1524 - protein, 15 aa, synthetic construct
  REGION 1..15: note = peptide derived from viral capsid protein
AQPAKKRLNFGQTGD

SEQ ID NO: 1525 - protein, 15 aa, synthetic construct
  REGION 1..15: note = peptide derived from viral capsid protein
ARGLVLPGYKYLGPG

SEQ ID NO: 1526 - protein, 15 aa, synthetic construct
  REGION 1..15: note = peptide derived from viral capsid protein
ASSWALNGRNSLMNP

SEQ ID NO: 1527 - protein, 15 aa, synthetic construct
  REGION 1..15: note = peptide derived from viral capsid protein
AVNTEGVYSEPRPIG

SEQ ID NO: 1528 - protein, 15 aa, synthetic construct
  REGION 1..15: note = peptide derived from viral capsid protein
DNNEGADGVGSSSGN

SEQ ID NO: 1529 - protein, 15 aa, synthetic construct
  REGION 1..15: note = peptide derived from viral capsid protein
DPQPIGEPPAAPSGV

SEQ ID NO: 1530 - protein, 15 aa, synthetic construct
  REGION 1..15: note = peptide derived from viral capsid protein
DRFFPLSGSLIFGKQ

SEQ ID NO: 1531 - protein, 15 aa, synthetic construct
  REGION 1..15: note = peptide derived from viral capsid protein
FGMKHPPPQILIKNT

SEQ ID NO: 1532 - protein, 15 aa, synthetic construct
  REGION 1..15: note = peptide derived from viral capsid protein
GLVLPGYKYLGPGNG

SEQ ID NO: 1533 - protein, 15 aa, synthetic construct
  REGION 1..15: note = peptide derived from viral capsid protein
GNLGRAVFQAKKRLL

SEQ ID NO: 1534 - protein, 15 aa, synthetic construct
  REGION 1..15: note = peptide derived from viral capsid protein
GPGNGLDKGEPVNAA

SEQ ID NO: 1535 - protein, 15 aa, synthetic construct
  REGION 1..15: note = peptide derived from viral capsid protein
GQTGDTESVPDPQPI

SEQ ID NO: 1536 - protein, 15 aa, synthetic construct
  REGION 1..15: note = peptide derived from viral capsid protein
GSSSGNWHCDSQWLG

SEQ ID NO: 1537 - protein, 15 aa, synthetic construct
  REGION 1..15: note = peptide derived from viral capsid protein
GWVQNQGILPGMVWQ

SEQ ID NO: 1538 - protein, 15 aa, synthetic construct
  REGION 1..15: note = peptide derived from viral capsid protein
IANNLTSTVQVFTDS

SEQ ID NO: 1539 - protein, 15 aa, synthetic construct
  REGION 1..15: note = peptide derived from viral capsid protein
KKRLLEPLGLVEEAA

SEQ ID NO: 1540 - protein, 15 aa, synthetic construct
  REGION 1..15: note = peptide derived from viral capsid protein
KKRLNFGQTGDTESV

SEQ ID NO: 1541 - protein, 15 aa, synthetic construct
  REGION 1..15: note = peptide derived from viral capsid protein
LEPLGLVEEAAKTAP

SEQ ID NO: 1542 - protein, 15 aa, synthetic construct
  REGION 1..15: note = peptide derived from viral capsid protein
LGLVEEAAKTAPGKK

SEQ ID NO: 1543 - protein, 15 aa, synthetic construct
  REGION 1..15: note = peptide derived from viral capsid protein
LKAGDNPYLKYNHAD

SEQ ID NO: 1544 - protein, 15 aa, synthetic construct
  REGION 1..15: note = peptide derived from viral capsid protein
LMGGFGMKHPPPQIL

SEQ ID NO: 1545 - protein, 15 aa, synthetic construct
  REGION 1..15: note = peptide derived from viral capsid protein
LNDGSQAVGRSSFYC

SEQ ID NO: 1546 - protein, 15 aa, synthetic construct
  REGION 1..15: note = peptide derived from viral capsid protein
LPYVLGSAHEGCLPP

SEQ ID NO: 1547 - protein, 15 aa, synthetic construct
  REGION 1..15: note = peptide derived from viral capsid protein
LSEGIREWWALKPGA

SEQ ID NO: 1548 - protein, 15 aa, synthetic construct
  REGION 1..15: note = peptide derived from viral capsid protein
MKHPPPQILIKNTPV

SEQ ID NO: 1549 - protein, 15 aa, synthetic construct
  REGION 1..15: note = peptide derived from viral capsid protein
NLSEGIREWWALKPG

SEQ ID NO: 1550 - protein, 15 aa, synthetic construct
  REGION 1..15: note = peptide derived from viral capsid protein
NSTSGGSSNDNAYFG

SEQ ID NO: 1551 - protein, 15 aa, synthetic construct
  REGION 1..15: note = peptide derived from viral capsid protein
NTEGVYSEPRPIGTR

SEQ ID NO: 1552 - protein, 15 aa, synthetic construct
  REGION 1..15: note = peptide derived from viral capsid protein
NYYKSNNVEFAVNTE

SEQ ID NO: 1553 - protein, 15 aa, synthetic construct
  REGION 1..15: note = peptide derived from viral capsid protein
PADPPTAFNKDKLNS

SEQ ID NO: 1554 - protein, 15 aa, synthetic construct
  REGION 1..15: note = peptide derived from viral capsid protein
PAKKRLNFGQTGDTE

SEQ ID NO: 1555 - protein, 15 aa, synthetic construct
  REGION 1..15: note = peptide derived from viral capsid protein
PLIDQYLYYLSKTIN

SEQ ID NO: 1556 - protein, 15 aa, synthetic construct
  REGION 1..15: note = peptide derived from viral capsid protein
PLMGGFGMKHPPPQI

SEQ ID NO: 1557 - protein, 15 aa, synthetic construct
  REGION 1..15: note = peptide derived from viral capsid protein
PQEPDSSAGIGKSGA

SEQ ID NO: 1558 - protein, 15 aa, synthetic construct
  REGION 1..15: note = peptide derived from viral capsid protein
PQPKANQQHQDNARG

SEQ ID NO: 1559 - protein, 15 aa, synthetic construct
  REGION 1..15: note = peptide derived from viral capsid protein
PSPLMGGFGMKHPPP

SEQ ID NO: 1560 - protein, 15 aa, synthetic construct
  REGION 1..15: note = peptide derived from viral capsid protein
PSQMLRTGNNFQFSY

SEQ ID NO: 1561 - protein, 15 aa, synthetic construct
  REGION 1..15: note = peptide derived from viral capsid protein
PSYRQQRVSTTVTQN

SEQ ID NO: 1562 - protein, 15 aa, synthetic construct
  REGION 1..15: note = peptide derived from viral capsid protein
QNQQTLKFSVAGPSN

SEQ ID NO: 1563 - protein, 15 aa, synthetic construct
  REGION 1..15: note = peptide derived from viral capsid protein
QTGWVQNQGILPGMV

SEQ ID NO: 1564 - protein, 15 aa, synthetic construct
  REGION 1..15: note = peptide derived from viral capsid protein
QYTSNYYKSNNVEFA

SEQ ID NO: 1565 - protein, 15 aa, synthetic construct
  REGION 1..15: note = peptide derived from viral capsid protein
RLMNPLIDQYLYYLS

SEQ ID NO: 1566 - protein, 15 aa, synthetic construct
  REGION 1..15: note = peptide derived from viral capsid protein
RLNFGQTGDTESVPD

SEQ ID NO: 1567 - protein, 15 aa, synthetic construct
  REGION 1..15: note = peptide derived from viral capsid protein
RNSLMNPGPAMASHK

SEQ ID NO: 1568 - protein, 15 aa, synthetic construct
  REGION 1..15: note = peptide derived from viral capsid protein
SAQAQAQTGWVQNQG

SEQ ID NO: 1569 - protein, 15 aa, synthetic construct
  REGION 1..15: note = peptide derived from viral capsid protein
SGNWHCDSQWLGDRV

SEQ ID NO: 1570 - protein, 15 aa, synthetic construct
  REGION 1..15: note = peptide derived from viral capsid protein
SHKEGEDRFFPLSGS

SEQ ID NO: 1571 - protein, 15 aa, synthetic construct
  REGION 1..15: note = peptide derived from viral capsid protein
SLMNPGPAMASHKEG

SEQ ID NO: 1572 - protein, 15 aa, synthetic construct
  REGION 1..15: note = peptide derived from viral capsid protein
SQMLRTGNNFQFSYE

SEQ ID NO: 1573 - protein, 15 aa, synthetic construct
  REGION 1..15: note = peptide derived from viral capsid protein
TDSDYQLPYVLGSAH

SEQ ID NO: 1574 - protein, 15 aa, synthetic construct
  REGION 1..15: note = peptide derived from viral capsid protein
TESYGQVATNHQSAQ

SEQ ID NO: 1575 - protein, 15 aa, synthetic construct
  REGION 1..15: note = peptide derived from viral capsid protein
TLKFSVAGPSNMAVQ

SEQ ID NO: 1576 - protein, 15 aa, synthetic construct
  REGION 1..15: note = peptide derived from viral capsid protein
TSNYYKSNNVEFAVN

SEQ ID NO: 1577 - protein, 15 aa, synthetic construct
  REGION 1..15: note = peptide derived from viral capsid protein
VFTDSDYQLPYVLGS

SEQ ID NO: 1578 - protein, 15 aa, synthetic construct
  REGION 1..15: note = peptide derived from viral capsid protein
VGSLTMASGGGAPVA

SEQ ID NO: 1579 - protein, 15 aa, synthetic construct
  REGION 1..15: note = peptide derived from viral capsid protein
VPADPPTAFNKDKLN

SEQ ID NO: 1580 - protein, 15 aa, synthetic construct
  REGION 1..15: note = peptide derived from viral capsid protein
WVQNQGILPGMVWQD

SEQ ID NO: 1581 - protein, 15 aa, synthetic construct
  REGION 1..15: note = peptide derived from viral capsid protein
WWALKPGAPQPKANQ

SEQ ID NO: 1582 - protein, 15 aa, synthetic construct
  REGION 1..15: note = peptide derived from viral capsid protein
YDQQLKAGDNPYLKY

SEQ ID NO: 1583 - protein, 15 aa, synthetic construct
  REGION 1..15: note = peptide derived from viral capsid protein
YKYLGPGNGLDKGEP

SEQ ID NO: 1584 - protein, 15 aa, synthetic construct
  REGION 1..15: note = peptide derived from viral capsid protein
YLGPGNGLDKGEPVN

SEQ ID NO: 1585 - protein, 15 aa, synthetic construct
  REGION 1..15: note = peptide derived from viral capsid protein
YRQQRVSTTVTQNNN

SEQ ID NO: 1586 - protein, 15 aa, synthetic construct
  REGION 1..15: note = peptide derived from viral capsid protein
YYKSNNVEFAVNTEG

SEQ ID NO: 1587 - protein, 15 aa, synthetic construct
  REGION 1..15: note = peptide derived from viral capsid protein
TDGNFHPSPLMGGFG

SEQ ID NO: 1588 - protein, 15 aa, synthetic construct
  REGION 1..15: note = peptide derived from viral capsid protein
WELQKENSKRWNPEI

SEQ ID NO: 1589 - protein, 15 aa, synthetic construct
  REGION 1..15: note = peptide derived from viral capsid protein
HTDGNFHPSPLMGGF

SEQ ID NO: 1590 - protein, 15 aa, synthetic construct
  REGION 1..15: note = peptide derived from viral capsid protein
PHTDGNFHPSPLMGG

SEQ ID NO: 1591 - protein, 15 aa, synthetic construct
  REGION 1..15: note = peptide derived from viral capsid protein
AKIPHTDGNFHPSPL

SEQ ID NO: 1592 - protein, 15 aa, synthetic construct
  REGION 1..15: note = peptide derived from viral capsid protein
QKENSKRWNPEIQYT

SEQ ID NO: 1593 - protein, 15 aa, synthetic construct
  REGION 1..15: note = peptide derived from viral capsid protein
GPIWAKIPHTDGNFH

SEQ ID NO: 1594 - protein, 15 aa, synthetic construct
  REGION 1..15: note = peptide derived from viral capsid protein
GVYSEPRPIGTRYLT

SEQ ID NO: 1595 - protein, 15 aa, synthetic construct
  REGION 1..15: note = peptide derived from viral capsid protein
KENSKRWNPEIQYTS

SEQ ID NO: 1596 - protein, 15 aa, synthetic construct
  REGION 1..15: note = peptide derived from viral capsid protein
KIPHTDGNFHPSPLM

SEQ ID NO: 1597 - protein, 15 aa, synthetic construct
  REGION 1..15: note = peptide derived from viral capsid protein
LQKENSKRWNPEIQY

SEQ ID NO: 1598 - protein, 15 aa, synthetic construct
  REGION 1..15: note = peptide derived from viral capsid protein
PIWAKIPHTDGNFHP

SEQ ID NO: 1599 - protein, 15 aa, synthetic construct
  REGION 1..15: note = peptide derived from viral capsid protein
TIQVFTDSEYQLPYV

SEQ ID NO: 1600 - protein, 15 aa, synthetic construct
  REGION 1..15: note = peptide derived from viral capsid protein
NNLTSTIQVFTDSEY

SEQ ID NO: 1601 - protein, 15 aa, synthetic construct
  REGION 1..15: note = peptide derived from viral capsid protein
HKDDEERFFPSNGIL

SEQ ID NO: 1602 - protein, 15 aa, synthetic construct
  REGION 1..15: note = peptide derived from viral capsid protein
SSGNWHCDSTWLGDR

SEQ ID NO: 1603 - protein, 15 aa, synthetic construct
  REGION 1..15: note = peptide derived from viral capsid protein
ATNDNTYFGYSTPWG

SEQ ID NO: 1604 - protein, 15 aa, synthetic construct
  REGION 1..15: note = peptide derived from viral capsid protein
NFQFTYTFEDVPFHS

SEQ ID NO: 1605 - protein, 15 aa, synthetic construct
  REGION 1..15: note = peptide derived from viral capsid protein
TAPGKKRPVEPSPQR

SEQ ID NO: 1606 - protein, 15 aa, synthetic construct
  REGION 1..15: note = peptide derived from viral capsid protein
AALEHDKAYDQQLQA

SEQ ID NO: 1607 - protein, 15 aa, synthetic construct
  REGION 1..15: note = peptide derived from viral capsid protein
ADYSDVMLTSEEEIK

SEQ ID NO: 1608 - protein, 15 aa, synthetic construct
  REGION 1..15: note = peptide derived from viral capsid protein
ATHKDDEERFFPSNG

SEQ ID NO: 1609 - protein, 15 aa, synthetic construct
  REGION 1..15: note = peptide derived from viral capsid protein
EPPAAPSGVGPNTMA

SEQ ID NO: 1610 - protein, 15 aa, synthetic construct
  REGION 1..15: note = peptide derived from viral capsid protein
EWWALKPGAPKPKAN

SEQ ID NO: 1611 - protein, 15 aa, synthetic construct
  REGION 1..15: note = peptide derived from viral capsid protein
FGKQNAARDNADYSD

SEQ ID NO: 1612 - protein, 15 aa, synthetic construct
  REGION 1..15: note = peptide derived from viral capsid protein
MAAGGGAPMADNNEG

SEQ ID NO: 1613 - protein, 15 aa, synthetic construct
  REGION 1..15: note = peptide derived from viral capsid protein
PQIGTVNSQGALPGM

SEQ ID NO: 1614 - protein, 15 aa, synthetic construct
  REGION 1..15: note = peptide derived from viral capsid protein
QVFTDSEYQLPYVLG

SEQ ID NO: 1615 - protein, 15 aa, synthetic construct
  REGION 1..15: note = peptide derived from viral capsid protein
VGSSSGNWHCDSTWL

SEQ ID NO: 1616 - protein, 15 aa, synthetic construct
  REGION 1..15: note = peptide derived from viral capsid protein
ANNLTSTIQVFTDSE

SEQ ID NO: 1617 - protein, 15 aa, synthetic construct
  REGION 1..15: note = peptide derived from viral capsid protein
GIAMATHKDDEERFF

SEQ ID NO: 1618 - protein, 15 aa, synthetic construct
  REGION 1..15: note = peptide derived from viral capsid protein
GVGSSSGNWHCDSTW

SEQ ID NO: 1619 - protein, 15 aa, synthetic construct
  REGION 1..15: note = peptide derived from viral capsid protein
IDQYLYYLSRTQTTG

SEQ ID NO: 1620 - protein, 15 aa, synthetic construct
  REGION 1..15: note = peptide derived from viral capsid protein
IQVFTDSEYQLPYVL

SEQ ID NO: 1621 - protein, 15 aa, synthetic construct
  REGION 1..15: note = peptide derived from viral capsid protein
RQQRVSTTTGQNNNS

SEQ ID NO: 1622 - protein, 15 aa, synthetic construct
  REGION 1..15: note = peptide derived from viral capsid protein
TAPQIGTVNSQGALP

SEQ ID NO: 1623 - protein, 15 aa, synthetic construct
  REGION 1..15: note = peptide derived from viral capsid protein
YDQQLQAGDNPYLRY

SEQ ID NO: 1624 - protein, 15 aa, synthetic construct
  REGION 1..15: note = peptide derived from viral capsid protein
ATEEYGIVADNLQQQ

SEQ ID NO: 1625 - protein, 15 aa, synthetic construct
  REGION 1..15: note = peptide derived from viral capsid protein
EGAKTAPGKKRPVEP

SEQ ID NO: 1626 - protein, 15 aa, synthetic construct
  REGION 1..15: note = peptide derived from viral capsid protein
EVTQNEGTKTIANNL

SEQ ID NO: 1627 - protein, 15 aa, synthetic construct
  REGION 1..15: note = peptide derived from viral capsid protein
FKLFNIQVKEVTQNE

SEQ ID NO: 1628 - protein, 15 aa, synthetic construct
  REGION 1..15: note = peptide derived from viral capsid protein
FPSQMLRTGNNFQFT

SEQ ID NO: 1629 - protein, 15 aa, synthetic construct
  REGION 1..15: note = peptide derived from viral capsid protein
GPNTMANQAKNWLPG

SEQ ID NO: 1630 - protein, 15 aa, synthetic construct
  REGION 1..15: note = peptide derived from viral capsid protein
LEHDKAYDQQLQAGD

SEQ ID NO: 1631 - protein, 15 aa, synthetic construct
  REGION 1..15: note = peptide derived from viral capsid protein
LIFGKQNAARDNADY

SEQ ID NO: 1632 - protein, 15 aa, synthetic construct
  REGION 1..15: note = peptide derived from viral capsid protein
LTSTIQVFTDSEYQL

SEQ ID NO: 1633 - protein, 15 aa, synthetic construct
  REGION 1..15: note = peptide derived from viral capsid protein
LYKQISNGTSGGATN

SEQ ID NO: 1634 - protein, 15 aa, synthetic construct
  REGION 1..15: note = peptide derived from viral capsid protein
MANQAKNWLPGPCYR

SEQ ID NO: 1635 - protein, 15 aa, synthetic construct
  REGION 1..15: note = peptide derived from viral capsid protein
NLTSTIQVFTDSEYQ

SEQ ID NO: 1636 - protein, 15 aa, synthetic construct
  REGION 1..15: note = peptide derived from viral capsid protein
NPGIAMATHKDDEER

SEQ ID NO: 1637 - protein, 15 aa, synthetic construct
  REGION 1..15: note = peptide derived from viral capsid protein
NQSKLNSFITQYSTG

SEQ ID NO: 1638 - protein, 15 aa, synthetic construct
  REGION 1..15: note = peptide derived from viral capsid protein
PNTMAAGGGAPMADN

SEQ ID NO: 1639 - protein, 15 aa, synthetic construct
  REGION 1..15: note = peptide derived from viral capsid protein
SFKLFNIQVKEVTQN

SEQ ID NO: 1640 - protein, 15 aa, synthetic construct
  REGION 1..15: note = peptide derived from viral capsid protein
TDSEYQLPYVLGSAH

SEQ ID NO: 1641 - protein, 15 aa, synthetic construct
  REGION 1..15: note = peptide derived from viral capsid protein
TMAAGGGAPMADNNE

SEQ ID NO: 1642 - protein, 15 aa, synthetic construct
  REGION 1..15: note = peptide derived from viral capsid protein
AMATHKDDEERFFPS

SEQ ID NO: 1643 - protein, 15 aa, synthetic construct
  REGION 1..15: note = peptide derived from viral capsid protein
APSGVGPNTMAAGGG

SEQ ID NO: 1644 - protein, 15 aa, synthetic construct
  REGION 1..15: note = peptide derived from viral capsid protein
DPPTTFNQSKLNSFI

SEQ ID NO: 1645 - protein, 15 aa, synthetic construct
  REGION 1..15: note = peptide derived from viral capsid protein
DPQPLGEPPAAPSGV

SEQ ID NO: 1646 - protein, 15 aa, synthetic construct
  REGION 1..15: note = peptide derived from viral capsid protein
EGIREWWALKPGAPK

SEQ ID NO: 1647 - protein, 15 aa, synthetic construct
  REGION 1..15: note = peptide derived from viral capsid protein
FPSNGILIFGKQNAA

SEQ ID NO: 1648 - protein, 15 aa, synthetic construct
  REGION 1..15: note = peptide derived from viral capsid protein
FTDSEYQLPYVLGSA

SEQ ID NO: 1649 - protein, 15 aa, synthetic construct
  REGION 1..15: note = peptide derived from viral capsid protein
GAKTAPGKKRPVEPS

SEQ ID NO: 1650 - protein, 15 aa, synthetic construct
  REGION 1..15: note = peptide derived from viral capsid protein
GGTANTQTLGFSQGG

SEQ ID NO: 1651 - protein, 15 aa, synthetic construct
  REGION 1..15: note = peptide derived from viral capsid protein
GILIFGKQNAARDNA

SEQ ID NO: 1652 - protein, 15 aa, synthetic construct
  REGION 1..15: note = peptide derived from viral capsid protein
GTKTIANNLTSTIQV

SEQ ID NO: 1653 - protein, 15 aa, synthetic construct
  REGION 1..15: note = peptide derived from viral capsid protein
INNNWGFRPKRLSFK

SEQ ID NO: 1654 - protein, 15 aa, synthetic construct
  REGION 1..15: note = peptide derived from viral capsid protein
IQYTSNYYKSTSVDF

SEQ ID NO: 1655 - protein, 15 aa, synthetic construct
  REGION 1..15: note = peptide derived from viral capsid protein
ISNGTSGGATNDNTY

SEQ ID NO: 1656 - protein, 15 aa, synthetic construct
  REGION 1..15: note = peptide derived from viral capsid protein
KAYDQQLQAGDNPYL

SEQ ID NO: 1657 - protein, 15 aa, synthetic construct
  REGION 1..15: note = peptide derived from viral capsid protein
KEVTQNEGTKTIANN

SEQ ID NO: 1658 - protein, 15 aa, synthetic construct
  REGION 1..15: note = peptide derived from viral capsid protein
KLFNIQVKEVTQNEG

SEQ ID NO: 1659 - protein, 15 aa, synthetic construct
  REGION 1..15: note = peptide derived from viral capsid protein
KSTSVDFAVNTEGVY

SEQ ID NO: 1660 - protein, 15 aa, synthetic construct
  REGION 1..15: note = peptide derived from viral capsid protein
KTIANNLTSTIQVFT

SEQ ID NO: 1661 - protein, 15 aa, synthetic construct
  REGION 1..15: note = peptide derived from viral capsid protein
KTTNPVATEEYGIVA

SEQ ID NO: 1662 - protein, 15 aa, synthetic construct
  REGION 1..15: note = peptide derived from viral capsid protein
LMNPLIDQYLYYLSR

SEQ ID NO: 1663 - protein, 15 aa, synthetic construct
  REGION 1..15: note = peptide derived from viral capsid protein
LPTYNNHLYKQISNG

SEQ ID NO: 1664 - protein, 15 aa, synthetic construct
  REGION 1..15: note = peptide derived from viral capsid protein
LTSEEEIKTTNPVAT

SEQ ID NO: 1665 - protein, 15 aa, synthetic construct
  REGION 1..15: note = peptide derived from viral capsid protein
MADNNEGADGVGSSS

SEQ ID NO: 1666 - protein, 15 aa, synthetic construct
  REGION 1..15: note = peptide derived from viral capsid protein
NGTSGGATNDNTYFG

SEQ ID NO: 1667 - protein, 15 aa, synthetic construct
  REGION 1..15: note = peptide derived from viral capsid protein
NHLYKQISNGTSGGA

SEQ ID NO: 1668 - protein, 15 aa, synthetic construct
  REGION 1..15: note = peptide derived from viral capsid protein
NIQVKEVTQNEGTKT

SEQ ID NO: 1669 - protein, 15 aa, synthetic construct
  REGION 1..15: note = peptide derived from viral capsid protein
NLQQQNTAPQIGTVN

SEQ ID NO: 1670 - protein, 15 aa, synthetic construct
  REGION 1..15: note = peptide derived from viral capsid protein
NNHLYKQISNGTSGG

SEQ ID NO: 1671 - protein, 15 aa, synthetic construct
  REGION 1..15: note = peptide derived from viral capsid protein
NTMANQAKNWLPGPC

SEQ ID NO: 1672 - protein, 15 aa, synthetic construct
  REGION 1..15: note = peptide derived from viral capsid protein
PEIQYTSNYYKSTSV

SEQ ID NO: 1673 - protein, 15 aa, synthetic construct
  REGION 1..15: note = peptide derived from viral capsid protein
PGKKRPVEPSPQRSP

SEQ ID NO: 1674 - protein, 15 aa, synthetic construct
  REGION 1..15: note = peptide derived from viral capsid protein
PTYNNHLYKQISNGT

SEQ ID NO: 1675 - protein, 15 aa, synthetic construct
  REGION 1..15: note = peptide derived from viral capsid protein
QGGPNTMANQAKNWL

SEQ ID NO: 1676 - protein, 15 aa, synthetic construct
  REGION 1..15: note = peptide derived from viral capsid protein
QNEGTKTIANNLTST

SEQ ID NO: 1677 - protein, 15 aa, synthetic construct
  REGION 1..15: note = peptide derived from viral capsid protein
QNNNSNFAWTAGTKY

SEQ ID NO: 1678 - protein, 15 aa, synthetic construct
  REGION 1..15: note = peptide derived from viral capsid protein
QNTAPQIGTVNSQGA

SEQ ID NO: 1679 - protein, 15 aa, synthetic construct
  REGION 1..15: note = peptide derived from viral capsid protein
QPLGEPPAAPSGVGP

SEQ ID NO: 1680 - protein, 15 aa, synthetic construct
  REGION 1..15: note = peptide derived from viral capsid protein
QTLGFSQGGPNTMAN

SEQ ID NO: 1681 - protein, 15 aa, synthetic construct
  REGION 1..15: note = peptide derived from viral capsid protein
QVKEVTQNEGTKTIA

SEQ ID NO: 1682 - protein, 15 aa, synthetic construct
  REGION 1..15: note = peptide derived from viral capsid protein
SGVGPNTMAAGGGAP

SEQ ID NO: 1683 - protein, 15 aa, synthetic construct
  REGION 1..15: note = peptide derived from viral capsid protein
SNFAWTAGTKYHLNG

SEQ ID NO: 1684 - protein, 15 aa, synthetic construct
  REGION 1..15: note = peptide derived from viral capsid protein
SQGALPGMVWQNRDV

SEQ ID NO: 1685 - protein, 15 aa, synthetic construct
  REGION 1..15: note = peptide derived from viral capsid protein
TQNEGTKTIANNLTS

SEQ ID NO: 1686 - protein, 15 aa, synthetic construct
  REGION 1..15: note = peptide derived from viral capsid protein
TSGGATNDNTYFGYS

SEQ ID NO: 1687 - protein, 15 aa, synthetic construct
  REGION 1..15: note = peptide derived from viral capsid protein
TSTIQVFTDSEYQLP

SEQ ID NO: 1688 - protein, 15 aa, synthetic construct
  REGION 1..15: note = peptide derived from viral capsid protein
TYNNHLYKQISNGTS

SEQ ID NO: 1689 - protein, 15 aa, synthetic construct
  REGION 1..15: note = peptide derived from viral capsid protein
VGPNTMAAGGGAPMA

SEQ ID NO: 1690 - protein, 15 aa, synthetic construct
  REGION 1..15: note = peptide derived from viral capsid protein
VMLTSEEEIKTTNPV

SEQ ID NO: 1691 - protein, 15 aa, synthetic construct
  REGION 1..15: note = peptide derived from viral capsid protein
WLPGPCYRQQRVSTT

SEQ ID NO: 1692 - protein, 15 aa, synthetic construct
  REGION 1..15: note = peptide derived from viral capsid protein
YLSRTQTTGGTANTQ

SEQ ID NO: 1693 - protein, 15 aa, synthetic construct
  REGION 1..15: note = peptide derived from viral capsid protein
YYKSTSVDFAVNTEG

SEQ ID NO: 1694 - protein, 15 aa, synthetic construct
  REGION 1..15: note = peptide derived from viral capsid protein
DGNFHPSPLMGGFGL

SEQ ID NO: 1695 - protein, 15 aa, synthetic construct
  REGION 1..15: note = peptide derived from viral capsid protein
NDNTYFGYSTPWGYF

SEQ ID NO: 1696 - protein, 15 aa, synthetic construct
  REGION 1..15: note = peptide derived from viral capsid protein
GALPGMVWQNRDVYL

SEQ ID NO: 1697 - protein, 15 aa, synthetic construct
  REGION 1..15: note = peptide derived from viral capsid protein
AGGGAPMADNNEGAD

SEQ ID NO: 1698 - protein, 15 aa, synthetic construct
  REGION 1..15: note = peptide derived from viral capsid protein
RPVEPSPQRSPDSST

SEQ ID NO: 1699 - protein, 15 aa, synthetic construct
  REGION 1..15: note = peptide derived from viral capsid protein
MVWQNRDVYLQGPIW

SEQ ID NO: 1700 - protein, 15 aa, synthetic construct
  REGION 1..15: note = peptide derived from viral capsid protein
TNDNTYFGYSTPWGY

SEQ ID NO: 1701 - protein, 15 aa, synthetic construct
  REGION 1..15: note = peptide derived from viral capsid protein
KRPVEPSPQRSPDSS

SEQ ID NO: 1702 - protein, 15 aa, synthetic construct
  REGION 1..15: note = peptide derived from viral capsid protein
LPGMVWQNRDVYLQG

SEQ ID NO: 1703 - protein, 15 aa, synthetic construct
  REGION 1..15: note = peptide derived from viral capsid protein
VPDPQPLGEPPAAPS

SEQ ID NO: 1704 - protein, 15 aa, synthetic construct
  REGION 1..15: note = peptide derived from viral capsid protein
VWQNRDVYLQGPIWA

SEQ ID NO: 1705 - protein, 15 aa, synthetic construct
  REGION 1..15: note = peptide derived from viral capsid protein
AAGGGAPMADNNEGA

SEQ ID NO: 1706 - protein, 15 aa, synthetic construct
  REGION 1..15: note = peptide derived from viral capsid protein
DSSTGIGKKGQQPAR

SEQ ID NO: 1707 - protein, 15 aa, synthetic construct
  REGION 1..15: note = peptide derived from viral capsid protein
GKKGQQPARKRLNFG

SEQ ID NO: 1708 - protein, 15 aa, synthetic construct
  REGION 1..15: note = peptide derived from viral capsid protein
NFHPSPLMGGFGLKH

SEQ ID NO: 1709 - protein, 15 aa, synthetic construct
  REGION 1..15: note = peptide derived from viral capsid protein
QGALPGMVWQNRDVY

SEQ ID NO: 1710 - protein, 15 aa, synthetic construct
  REGION 1..15: note = peptide derived from viral capsid protein
QQPARKRLNFGQTGD

SEQ ID NO: 1711 - protein, 15 aa, synthetic construct
  REGION 1..15: note = peptide derived from viral capsid protein
ALPGMVWQNRDVYLQ

SEQ ID NO: 1712 - protein, 15 aa, synthetic construct
  REGION 1..15: note = peptide derived from viral capsid protein
GIGKKGQQPARKRLN

SEQ ID NO: 1713 - protein, 15 aa, synthetic construct
  REGION 1..15: note = peptide derived from viral capsid protein
GMVWQNRDVYLQGPI

SEQ ID NO: 1714 - protein, 15 aa, synthetic construct
  REGION 1..15: note = peptide derived from viral capsid protein
GNFHPSPLMGGFGLK

SEQ ID NO: 1715 - protein, 15 aa, synthetic construct
  REGION 1..15: note = peptide derived from viral capsid protein
KKRPVEPSPQRSPDS

SEQ ID NO: 1716 - protein, 15 aa, synthetic construct
  REGION 1..15: note = peptide derived from viral capsid protein
PDSSTGIGKKGQQPA

SEQ ID NO: 1717 - protein, 15 aa, synthetic construct
  REGION 1..15: note = peptide derived from viral capsid protein
PGMVWQNRDVYLQGP

SEQ ID NO: 1718 - protein, 15 aa, synthetic construct
  REGION 1..15: note = peptide derived from viral capsid protein
QRSPDSSTGIGKKGQ

SEQ ID NO: 1719 - protein, 15 aa, synthetic construct
  REGION 1..15: note = peptide derived from viral capsid protein
VEPSPQRSPDSSTGI

SEQ ID NO: 1720 - protein, 15 aa, synthetic construct
  REGION 1..15: note = peptide derived from viral capsid protein
QAKKRVLEPLGLVEE

SEQ ID NO: 1721 - protein, 15 aa, synthetic construct
  REGION 1..15: note = peptide derived from viral capsid protein
EPLGLVEEGAKTAPG

SEQ ID NO: 1722 - protein, 15 aa, synthetic construct
  REGION 1..15: note = peptide derived from viral capsid protein
RAVFQAKKRVLEPLG

SEQ ID NO: 1723 - protein, 15 aa, synthetic construct
  REGION 1..15: note = peptide derived from viral capsid protein
AKKRVLEPLGLVEEG

SEQ ID NO: 1724 - protein, 15 aa, synthetic construct
  REGION 1..15: note = peptide derived from viral capsid protein
FQAKKRVLEPLGLVE

SEQ ID NO: 1725 - protein, 15 aa, synthetic construct
  REGION 1..15: note = peptide derived from viral capsid protein
PLGLVEEGAKTAPGK

SEQ ID NO: 1726 - protein, 15 aa, synthetic construct
  REGION 1..15: note = peptide derived from viral capsid protein
RVLEPLGLVEEGAKT

SEQ ID NO: 1727 - protein, 15 aa, synthetic construct
  REGION 1..15: note = peptide derived from viral capsid protein
GYSTPWGYFDFNRFH

SEQ ID NO: 1728 - protein, 15 aa, synthetic construct
  REGION 1..15: note = peptide derived from viral capsid protein
FEFTYNFEEVPFHSS

SEQ ID NO: 1729 - protein, 15 aa, synthetic construct
  REGION 1..15: note = peptide derived from viral capsid protein
NPTERSSFFCLEYFP

SEQ ID NO: 1730 - protein, 15 aa, synthetic construct
  REGION 1..15: note = peptide derived from viral capsid protein
GDWHCDSTWMGDRVV

SEQ ID NO: 1731 - protein, 15 aa, synthetic construct
  REGION 1..15: note = peptide derived from viral capsid protein
TVQVFTDDDYQLPYV

SEQ ID NO: 1732 - protein, 15 aa, synthetic construct
  REGION 1..15: note = peptide derived from viral capsid protein
FTYNFEEVPFHSSFA

SEQ ID NO: 1733 - protein, 15 aa, synthetic construct
  REGION 1..15: note = peptide derived from viral capsid protein
VDHPPDWLEEVGEGL

SEQ ID NO: 1734 - protein, 15 aa, synthetic construct
  REGION 1..15: note = peptide derived from viral capsid protein
RSSFFCLEYFPSKML

SEQ ID NO: 1735 - protein, 15 aa, synthetic construct
  REGION 1..15: note = peptide derived from viral capsid protein
TGAHFHPSPAMGGFG

SEQ ID NO: 1736 - protein, 15 aa, synthetic construct
  REGION 1..15: note = peptide derived from viral capsid protein
ASGDWHCDSTWMGDR

SEQ ID NO: 1737 - protein, 15 aa, synthetic construct
  REGION 1..15: note = peptide derived from viral capsid protein
GVGNASGDWHCDSTW

SEQ ID NO: 1738 - protein, 15 aa, synthetic construct
  REGION 1..15: note = peptide derived from viral capsid protein
PQFVDFAPDSTGEYR

SEQ ID NO: 1739 - protein, 15 aa, synthetic construct
  REGION 1..15: note = peptide derived from viral capsid protein
RGEPVNRADEVAREH

SEQ ID NO: 1740 - protein, 15 aa, synthetic construct
  REGION 1..15: note = peptide derived from viral capsid protein
AYFGYSTPWGYFDFN

SEQ ID NO: 1741 - protein, 15 aa, synthetic construct
  REGION 1..15: note = peptide derived from viral capsid protein
DNTENPTERSSFFCL

SEQ ID NO: 1742 - protein, 15 aa, synthetic construct
  REGION 1..15: note = peptide derived from viral capsid protein
DYQLPYVVGNGTEGC

SEQ ID NO: 1743 - protein, 15 aa, synthetic construct
  REGION 1..15: note = peptide derived from viral capsid protein
PETGAHFHPSPAMGG

SEQ ID NO: 1744 - protein, 15 aa, synthetic construct
  REGION 1..15: note = peptide derived from viral capsid protein
RADEVAREHDISYNE

SEQ ID NO: 1745 - protein, 15 aa, synthetic construct
  REGION 1..15: note = peptide derived from viral capsid protein
TERSSFFCLEYFPSK

SEQ ID NO: 1746 - protein, 15 aa, synthetic construct
  REGION 1..15: note = peptide derived from viral capsid protein
EGLREFLGLEAGPPK

SEQ ID NO: 1747 - protein, 15 aa, synthetic construct
  REGION 1..15: note = peptide derived from viral capsid protein
NDPQFVDFAPDSTGE

SEQ ID NO: 1748 - protein, 15 aa, synthetic construct
  REGION 1..15: note = peptide derived from viral capsid protein
PAMGGFGLKHPPPMM

SEQ ID NO: 1749 - protein, 15 aa, synthetic construct
  REGION 1..15: note = peptide derived from viral capsid protein
VAREHDISYNEQLEA

SEQ ID NO: 1750 - protein, 15 aa, synthetic construct
  REGION 1..15: note = peptide derived from viral capsid protein
VNRADEVAREHDISY

SEQ ID NO: 1751 - protein, 15 aa, synthetic construct
  REGION 1..15: note = peptide derived from viral capsid protein
YNHADAEFQEKLADD

SEQ ID NO: 1752 - protein, 15 aa, synthetic construct
  REGION 1..15: note = peptide derived from viral capsid protein
EPFGLVEEGAKTAPT

SEQ ID NO: 1753 - protein, 15 aa, synthetic construct
  REGION 1..15: note = peptide derived from viral capsid protein
FSDVPVSSFITQYST

SEQ ID NO: 1754 - protein, 15 aa, synthetic construct
  REGION 1..15: note = peptide derived from viral capsid protein
FTDDDYQLPYVVGNG

SEQ ID NO: 1755 - protein, 15 aa, synthetic construct
  REGION 1..15: note = peptide derived from viral capsid protein
HADAEFQEKLADDTS

SEQ ID NO: 1756 - protein, 15 aa, synthetic construct
  REGION 1..15: note = peptide derived from viral capsid protein
MGGFGLKHPPPMMLI

SEQ ID NO: 1757 - protein, 15 aa, synthetic construct
  REGION 1..15: note = peptide derived from viral capsid protein
NGLDRGEPVNRADEV

SEQ ID NO: 1758 - protein, 15 aa, synthetic construct
  REGION 1..15: note = peptide derived from viral capsid protein
NPEIQYTNNYNDPQF

SEQ ID NO: 1759 - protein, 15 aa, synthetic construct
  REGION 1..15: note = peptide derived from viral capsid protein
QVFTDDDYQLPYVVG

SEQ ID NO: 1760 - protein, 15 aa, synthetic construct
  REGION 1..15: note = peptide derived from viral capsid protein
REHDISYNEQLEAGD

SEQ ID NO: 1761 - protein, 15 aa, synthetic construct
  REGION 1..15: note = peptide derived from viral capsid protein
VGEGLREFLGLEAGP

SEQ ID NO: 1762 - protein, 15 aa, synthetic construct
  REGION 1..15: note = peptide derived from viral capsid protein
WGYFDFNRFHSHWSP

SEQ ID NO: 1763 - protein, 15 aa, synthetic construct
  REGION 1..15: note = peptide derived from viral capsid protein
WSPRDWQRLINNYWG

SEQ ID NO: 1764 - protein, 15 aa, synthetic construct
  REGION 1..15: note = peptide derived from viral capsid protein
YFDFNRFHSHWSPRD

SEQ ID NO: 1765 - protein, 15 aa, synthetic construct
  REGION 1..15: note = peptide derived from viral capsid protein
ADGVGNASGDWHCDS

SEQ ID NO: 1766 - protein, 15 aa, synthetic construct
  REGION 1..15: note = peptide derived from viral capsid protein
ARTEEDSKPSTSSDA

SEQ ID NO: 1767 - protein, 15 aa, synthetic construct
  REGION 1..15: note = peptide derived from viral capsid protein
ASVSAFATTNRMELE

SEQ ID NO: 1768 - protein, 15 aa, synthetic construct
  REGION 1..15: note = peptide derived from viral capsid protein
DFNRFHSHWSPRDWQ

SEQ ID NO: 1769 - protein, 15 aa, synthetic construct
  REGION 1..15: note = peptide derived from viral capsid protein
EGCLPAFPPQVFTLP

SEQ ID NO: 1770 - protein, 15 aa, synthetic construct
  REGION 1..15: note = peptide derived from viral capsid protein
ETQPVNRVAYNVGGQ

SEQ ID NO: 1771 - protein, 15 aa, synthetic construct
  REGION 1..15: note = peptide derived from viral capsid protein
FHPSPAMGGFGLKHP

SEQ ID NO: 1772 - protein, 15 aa, synthetic construct
  REGION 1..15: note = peptide derived from viral capsid protein
GGGGPLGDNNQGADG

SEQ ID NO: 1773 - protein, 15 aa, synthetic construct
  REGION 1..15: note = peptide derived from viral capsid protein
GGPLGDNNQGADGVG

SEQ ID NO: 1774 - protein, 15 aa, synthetic construct
  REGION 1..15: note = peptide derived from viral capsid protein
IDDHFPKRKKARTEE

SEQ ID NO: 1775 - protein, 15 aa, synthetic construct
  REGION 1..15: note = peptide derived from viral capsid protein
LVEEGAKTAPTGKRI

SEQ ID NO: 1776 - protein, 15 aa, synthetic construct
  REGION 1..15: note = peptide derived from viral capsid protein
NLQEIVPGSVWMERD

SEQ ID NO: 1777 - protein, 15 aa, synthetic construct
  REGION 1..15: note = peptide derived from viral capsid protein
NPYLKYNHADAEFQE

SEQ ID NO: 1778 - protein, 15 aa, synthetic construct
  REGION 1..15: note = peptide derived from viral capsid protein
PAFPPQVFTLPQYGY

SEQ ID NO: 1779 - protein, 15 aa, synthetic construct
  REGION 1..15: note = peptide derived from viral capsid protein
PASSLGADTMSAGGG

SEQ ID NO: 1780 - protein, 15 aa, synthetic construct
  REGION 1..15: note = peptide derived from viral capsid protein
PVSSFITQYSTGQVT

SEQ ID NO: 1781 - protein, 15 aa, synthetic construct
  REGION 1..15: note = peptide derived from viral capsid protein
QGADGVGNASGDWHC

SEQ ID NO: 1782 - protein, 15 aa, synthetic construct
  REGION 1..15: note = peptide derived from viral capsid protein
TGGVQFNKNLAGRYA

SEQ ID NO: 1783 - protein, 15 aa, synthetic construct
  REGION 1..15: note = peptide derived from viral capsid protein
VSAFATTNRMELEGA

SEQ ID NO: 1784 - protein, 15 aa, synthetic construct
  REGION 1..15: note = peptide derived from viral capsid protein
YFPSKMLRTGNNFEF

SEQ ID NO: 1785 - protein, 15 aa, synthetic construct
  REGION 1..15: note = peptide derived from viral capsid protein
YNFEEVPFHSSFAPS

SEQ ID NO: 1786 - protein, 15 aa, synthetic construct
  REGION 1..15: note = peptide derived from viral capsid protein
AFATTNRMELEGASY

SEQ ID NO: 1787 - protein, 15 aa, synthetic construct
  REGION 1..15: note = peptide derived from viral capsid protein
AHFHPSPAMGGFGLK

SEQ ID NO: 1788 - protein, 15 aa, synthetic construct
  REGION 1..15: note = peptide derived from viral capsid protein
DFAPDSTGEYRTTRP

SEQ ID NO: 1789 - protein, 15 aa, synthetic construct
  REGION 1..15: note = peptide derived from viral capsid protein
DGSNANAYFGYSTPW

SEQ ID NO: 1790 - protein, 15 aa, synthetic construct
  REGION 1..15: note = peptide derived from viral capsid protein
DNPYLKYNHADAEFQ

SEQ ID NO: 1791 - protein, 15 aa, synthetic construct
  REGION 1..15: note = peptide derived from viral capsid protein
DSTGEYRTTRPIGTR

SEQ ID NO: 1792 - protein, 15 aa, synthetic construct
  REGION 1..15: note = peptide derived from viral capsid protein
EGNMLITSESETQPV

SEQ ID NO: 1793 - protein, 15 aa, synthetic construct
  REGION 1..15: note = peptide derived from viral capsid protein
FVSTNNTGGVQFNKN

SEQ ID NO: 1794 - protein, 15 aa, synthetic construct
  REGION 1..15: note = peptide derived from viral capsid protein
GDNPYLKYNHADAEF

SEQ ID NO: 1795 - protein, 15 aa, synthetic construct
  REGION 1..15: note = peptide derived from viral capsid protein
GGNLGKAVFQAKKRV

SEQ ID NO: 1796 - protein, 15 aa, synthetic construct
  REGION 1..15: note = peptide derived from viral capsid protein
GTEGCLPAFPPQVFT

SEQ ID NO: 1797 - protein, 15 aa, synthetic construct
  REGION 1..15: note = peptide derived from viral capsid protein
HDISYNEQLEAGDNP

SEQ ID NO: 1798 - protein, 15 aa, synthetic construct
  REGION 1..15: note = peptide derived from viral capsid protein
IVPGSVWMERDVYLQ

SEQ ID NO: 1799 - protein, 15 aa, synthetic construct
  REGION 1..15: note = peptide derived from viral capsid protein
KIPETGAHFHPSPAM

SEQ ID NO: 1800 - protein, 15 aa, synthetic construct
  REGION 1..15: note = peptide derived from viral capsid protein
KMLRTGNNFEFTYNF

SEQ ID NO: 1801 - protein, 15 aa, synthetic construct
  REGION 1..15: note = peptide derived from viral capsid protein
LEAGPPKPKPNQQHQ

SEQ ID NO: 1802 - protein, 15 aa, synthetic construct
  REGION 1..15: note = peptide derived from viral capsid protein
LEYFPSKMLRTGNNF

SEQ ID NO: 1803 - protein, 15 aa, synthetic construct
  REGION 1..15: note = peptide derived from viral capsid protein
LGPGNGLDRGEPVNR

SEQ ID NO: 1804 - protein, 15 aa, synthetic construct
  REGION 1..15: note = peptide derived from viral capsid protein
LPGYNYLGPGNGLDR

SEQ ID NO: 1805 - protein, 15 aa, synthetic construct
  REGION 1..15: note = peptide derived from viral capsid protein
LVDQYLYRFVSTNNT

SEQ ID NO: 1806 - protein, 15 aa, synthetic construct
  REGION 1..15: note = peptide derived from viral capsid protein
NIQVKEVTVQDSTTT

SEQ ID NO: 1807 - protein, 15 aa, synthetic construct
  REGION 1..15: note = peptide derived from viral capsid protein
NITSFSDVPVSSFIT

SEQ ID NO: 1808 - protein, 15 aa, synthetic construct
  REGION 1..15: note = peptide derived from viral capsid protein
NNQGADGVGNASGDW

SEQ ID NO: 1809 - protein, 15 aa, synthetic construct
  REGION 1..15: note = peptide derived from viral capsid protein
NRASVSAFATTNRME

SEQ ID NO: 1810 - protein, 15 aa, synthetic construct
  REGION 1..15: note = peptide derived from viral capsid protein
NTPVPGNITSFSDVP

SEQ ID NO: 1811 - protein, 15 aa, synthetic construct
  REGION 1..15: note = peptide derived from viral capsid protein
NYLGPGNGLDRGEPV

SEQ ID NO: 1812 - protein, 15 aa, synthetic construct
  REGION 1..15: note = peptide derived from viral capsid protein
PATGTYNLQEIVPGS

SEQ ID NO: 1813 - protein, 15 aa, synthetic construct
  REGION 1..15: note = peptide derived from viral capsid protein
PGNGLDRGEPVNRAD

SEQ ID NO: 1814 - protein, 15 aa, synthetic construct
  REGION 1..15: note = peptide derived from viral capsid protein
PGNITSFSDVPVSSF

SEQ ID NO: 1815 - protein, 15 aa, synthetic construct
  REGION 1..15: note = peptide derived from viral capsid protein
PRDWQRLINNYWGFR

SEQ ID NO: 1816 - protein, 15 aa, synthetic construct
  REGION 1..15: note = peptide derived from viral capsid protein
PSPAMGGFGLKHPPP

SEQ ID NO: 1817 - protein, 15 aa, synthetic construct
  REGION 1..15: note = peptide derived from viral capsid protein
PYVVGNGTEGCLPAF

SEQ ID NO: 1818 - protein, 15 aa, synthetic construct
  REGION 1..15: note = peptide derived from viral capsid protein
QARGLVLPGYNYLGP

SEQ ID NO: 1819 - protein, 15 aa, synthetic construct
  REGION 1..15: note = peptide derived from viral capsid protein
QEKLADDTSFGGNLG

SEQ ID NO: 1820 - protein, 15 aa, synthetic construct
  REGION 1..15: note = peptide derived from viral capsid protein
QLPYVVGNGTEGCLP

SEQ ID NO: 1821 - protein, 15 aa, synthetic construct
  REGION 1..15: note = peptide derived from viral capsid protein
RMELEGASYQVPPQP

SEQ ID NO: 1822 - protein, 15 aa, synthetic construct
  REGION 1..15: note = peptide derived from viral capsid protein
SVWMERDVYLQGPIW

SEQ ID NO: 1823 - protein, 15 aa, synthetic construct
  REGION 1..15: note = peptide derived from viral capsid protein
TGEYRTTRPIGTRYL

SEQ ID NO: 1824 - protein, 15 aa, synthetic construct
  REGION 1..15: note = peptide derived from viral capsid protein
TTTIANNLTSTVQVF

SEQ ID NO: 1825 - protein, 15 aa, synthetic construct
  REGION 1..15: note = peptide derived from viral capsid protein
VVGNGTEGCLPAFPP

SEQ ID NO: 1826 - protein, 15 aa, synthetic construct
  REGION 1..15: note = peptide derived from viral capsid protein
WMERDVYLQGPIWAK

SEQ ID NO: 1827 - protein, 15 aa, synthetic construct
  REGION 1..15: note = peptide derived from viral capsid protein
WMGDRVVTKSTRTWV

SEQ ID NO: 1828 - protein, 15 aa, synthetic construct
  REGION 1..15: note = peptide derived from viral capsid protein
YLYRFVSTNNTGGVQ

SEQ ID NO: 1829 - protein, 15 aa, synthetic construct
  REGION 1..15: note = peptide derived from viral capsid protein
ADDTSFGGNLGKAVF

SEQ ID NO: 1830 - protein, 15 aa, synthetic construct
  REGION 1..15: note = peptide derived from viral capsid protein
AKKRVLEPFGLVEEG

SEQ ID NO: 1831 - protein, 15 aa, synthetic construct
  REGION 1..15: note = peptide derived from viral capsid protein
ALENTMIFNSQPANP

SEQ ID NO: 1832 - protein, 15 aa, synthetic construct
  REGION 1..15: note = peptide derived from viral capsid protein
APDSTGEYRTTRPIG

SEQ ID NO: 1833 - protein, 15 aa, synthetic construct
  REGION 1..15: note = peptide derived from viral capsid protein
APSQNLFKLANPLVD

SEQ ID NO: 1834 - protein, 15 aa, synthetic construct
  REGION 1..15: note = peptide derived from viral capsid protein
APTGKRIDDHFPKRK

SEQ ID NO: 1835 - protein, 15 aa, synthetic construct
  REGION 1..15: note = peptide derived from viral capsid protein
ASYQVPPQPNGMTNN

SEQ ID NO: 1836 - protein, 15 aa, synthetic construct
  REGION 1..15: note = peptide derived from viral capsid protein
ATNNQSSTTAPATGT

SEQ ID NO: 1837 - protein, 15 aa, synthetic construct
  REGION 1..15: note = peptide derived from viral capsid protein
DHFPKRKKARTEEDS

SEQ ID NO: 1838 - protein, 15 aa, synthetic construct
  REGION 1..15: note = peptide derived from viral capsid protein
DTSFGGNLGKAVFQA

SEQ ID NO: 1839 - protein, 15 aa, synthetic construct
  REGION 1..15: note = peptide derived from viral capsid protein
DVPVSSFITQYSTGQ

SEQ ID NO: 1840 - protein, 15 aa, synthetic construct
  REGION 1..15: note = peptide derived from viral capsid protein
DWQRLINNYWGFRPR

SEQ ID NO: 1841 - protein, 15 aa, synthetic construct
  REGION 1..15: note = peptide derived from viral capsid protein
FPPQVFTLPQYGYAT

SEQ ID NO: 1842 - protein, 15 aa, synthetic construct
  REGION 1..15: note = peptide derived from viral capsid protein
FQAKKRVLEPFGLVE

SEQ ID NO: 1843 - protein, 15 aa, synthetic construct
  REGION 1..15: note = peptide derived from viral capsid protein
GDNNQGADGVGNASG

SEQ ID NO: 1844 - protein, 15 aa, synthetic construct
  REGION 1..15: note = peptide derived from viral capsid protein
GDRVVTKSTRTWVLP

SEQ ID NO: 1845 - protein, 15 aa, synthetic construct
  REGION 1..15: note = peptide derived from viral capsid protein
GFRPRSLRVKIFNIQ

SEQ ID NO: 1846 - protein, 15 aa, synthetic construct
  REGION 1..15: note = peptide derived from viral capsid protein
GGQMATNNQSSTTAP

SEQ ID NO: 1847 - protein, 15 aa, synthetic construct
  REGION 1..15: note = peptide derived from viral capsid protein
GSGVNRASVSAFATT

SEQ ID NO: 1848 - protein, 15 aa, synthetic construct
  REGION 1..15: note = peptide derived from viral capsid protein
GSQQLQIPAQPASSL

SEQ ID NO: 1849 - protein, 15 aa, synthetic construct
  REGION 1..15: note = peptide derived from viral capsid protein
GVNRASVSAFATTNR

SEQ ID NO: 1850 - protein, 15 aa, synthetic construct
  REGION 1..15: note = peptide derived from viral capsid protein
IKSGSVDGSNANAYF

SEQ ID NO: 1851 - protein, 15 aa, synthetic construct
  REGION 1..15: note = peptide derived from viral capsid protein
KEVTVQDSTTTIANN

SEQ ID NO: 1852 - protein, 15 aa, synthetic construct
  REGION 1..15: note = peptide derived from viral capsid protein
KKENSKRWNPEIQYT

SEQ ID NO: 1853 - protein, 15 aa, synthetic construct
  REGION 1..15: note = peptide derived from viral capsid protein
LDRGEPVNRADEVAR

SEQ ID NO: 1854 - protein, 15 aa, synthetic construct
  REGION 1..15: note = peptide derived from viral capsid protein
LGADTMSAGGGGPLG

SEQ ID NO: 1855 - protein, 15 aa, synthetic construct
  REGION 1..15: note = peptide derived from viral capsid protein
LINNYWGFRPRSLRV

SEQ ID NO: 1856 - protein, 15 aa, synthetic construct
  REGION 1..15: note = peptide derived from viral capsid protein
LREFLGLEAGPPKPK

SEQ ID NO: 1857 - protein, 15 aa, synthetic construct
  REGION 1..15: note = peptide derived from viral capsid protein
LVLPGYNYLGPGNGL

SEQ ID NO: 1858 - protein, 15 aa, synthetic construct
  REGION 1..15: note = peptide derived from viral capsid protein
NLAGRYANTYKNWFP

SEQ ID NO: 1859 - protein, 15 aa, synthetic construct
  REGION 1..15: note = peptide derived from viral capsid protein
NLFKLANPLVDQYLY

SEQ ID NO: 1860 - protein, 15 aa, synthetic construct
  REGION 1..15: note = peptide derived from viral capsid protein
NNQSSTTAPATGTYN

SEQ ID NO: 1861 - protein, 15 aa, synthetic construct
  REGION 1..15: note = peptide derived from viral capsid protein
NNTGGVQFNKNLAGR

SEQ ID NO: 1862 - protein, 15 aa, synthetic construct
  REGION 1..15: note = peptide derived from viral capsid protein
NPLVDQYLYRFVSTN

SEQ ID NO: 1863 - protein, 15 aa, synthetic construct
  REGION 1..15: note = peptide derived from viral capsid protein
NRDNTENPTERSSFF

SEQ ID NO: 1864 - protein, 15 aa, synthetic construct
  REGION 1..15: note = peptide derived from viral capsid protein
PFHSSFAPSQNLFKL

SEQ ID NO: 1865 - protein, 15 aa, synthetic construct
  REGION 1..15: note = peptide derived from viral capsid protein
PIWAKIPETGAHFHP

SEQ ID NO: 1866 - protein, 15 aa, synthetic construct
  REGION 1..15: note = peptide derived from viral capsid protein
PLGDNNQGADGVGNA

SEQ ID NO: 1867 - protein, 15 aa, synthetic construct
  REGION 1..15: note = peptide derived from viral capsid protein
PMGRTQGWNLGSGVN

SEQ ID NO: 1868 - protein, 15 aa, synthetic construct
  REGION 1..15: note = peptide derived from viral capsid protein
PMMLIKNTPVPGNIT

SEQ ID NO: 1869 - protein, 15 aa, synthetic construct
  REGION 1..15: note = peptide derived from viral capsid protein
PQPNGMTNNLQGSNT

SEQ ID NO: 1870 - protein, 15 aa, synthetic construct
  REGION 1..15: note = peptide derived from viral capsid protein
QGPIWAKIPETGAHF

SEQ ID NO: 1871 - protein, 15 aa, synthetic construct
  REGION 1..15: note = peptide derived from viral capsid protein
QGSNTYALENTMIFN

SEQ ID NO: 1872 - protein, 15 aa, synthetic construct
  REGION 1..15: note = peptide derived from viral capsid protein
QPVNRVAYNVGGQMA

SEQ ID NO: 1873 - protein, 15 aa, synthetic construct
  REGION 1..15: note = peptide derived from viral capsid protein
QVKEVTVQDSTTTIA

SEQ ID NO: 1874 - protein, 15 aa, synthetic construct
  REGION 1..15: note = peptide derived from viral capsid protein
REIKSGSVDGSNANA

SEQ ID NO: 1875 - protein, 15 aa, synthetic construct
  REGION 1..15: note = peptide derived from viral capsid protein
RTTRPIGTRYLTRPL

SEQ ID NO: 1876 - protein, 15 aa, synthetic construct
  REGION 1..15: note = peptide derived from viral capsid protein
RWNPEIQYTNNYNDP

SEQ ID NO: 1877 - protein, 15 aa, synthetic construct
  REGION 1..15: note = peptide derived from viral capsid protein
RYANTYKNWFPGPMG

SEQ ID NO: 1878 - protein, 15 aa, synthetic construct
  REGION 1..15: note = peptide derived from viral capsid protein
SFFCLEYFPSKMLRT

SEQ ID NO: 1879 - protein, 15 aa, synthetic construct
  REGION 1..15: note = peptide derived from viral capsid protein
SFGGNLGKAVFQAKK

SEQ ID NO: 1880 - protein, 15 aa, synthetic construct
  REGION 1..15: note = peptide derived from viral capsid protein
SNANAYFGYSTPWGY

SEQ ID NO: 1881 - protein, 15 aa, synthetic construct
  REGION 1..15: note = peptide derived from viral capsid protein
SNTYALENTMIFNSQ

SEQ ID NO: 1882 - protein, 15 aa, synthetic construct
  REGION 1..15: note = peptide derived from viral capsid protein
SQNLFKLANPLVDQY

SEQ ID NO: 1883 - protein, 15 aa, synthetic construct
  REGION 1..15: note = peptide derived from viral capsid protein
SVDGSNANAYFGYST

SEQ ID NO: 1884 - protein, 15 aa, synthetic construct
  REGION 1..15: note = peptide derived from viral capsid protein
TGTYNLQEIVPGSVW

SEQ ID NO: 1885 - protein, 15 aa, synthetic construct
  REGION 1..15: note = peptide derived from viral capsid protein
TLNRDNTENPTERSS

SEQ ID NO: 1886 - protein, 15 aa, synthetic construct
  REGION 1..15: note = peptide derived from viral capsid protein
TSESETQPVNRVAYN

SEQ ID NO: 1887 - protein, 15 aa, synthetic construct
  REGION 1..15: note = peptide derived from viral capsid protein
TYKNWFPGPMGRTQG

SEQ ID NO: 1888 - protein, 15 aa, synthetic construct
  REGION 1..15: note = peptide derived from viral capsid protein
YATLNRDNTENPTER

SEQ ID NO: 1889 - protein, 15 aa, synthetic construct
  REGION 1..15: note = peptide derived from viral capsid protein
YGYATLNRDNTENPT

SEQ ID NO: 1890 - protein, 15 aa, synthetic construct
  REGION 1..15: note = peptide derived from viral capsid protein
YRFVSTNNTGGVQFN

SEQ ID NO: 1891 - protein, 15 aa, synthetic construct
  REGION 1..15: note = peptide derived from viral capsid protein
YSTPWGYFDFNRFHS

SEQ ID NO: 1892 - protein, 14 aa, synthetic construct
  REGION 1..14: note = peptide derived from viral capsid protein
DSQWLGDRVITTST

SEQ ID NO: 1893 - protein, 14 aa, synthetic construct
  REGION 1..14: note = peptide derived from viral capsid protein
DTNGVYSEPRPIGT

SEQ ID NO: 1894 - protein, 14 aa, synthetic construct
  REGION 1..14: note = peptide derived from viral capsid protein
STNLQRGNLALGET

SEQ ID NO: 1895 - protein, 14 aa, synthetic construct
  REGION 1..14: note = peptide derived from viral capsid protein
ANNLTSTVQIFADS

SEQ ID NO: 1896 - protein, 14 aa, synthetic construct
  REGION 1..14: note = peptide derived from viral capsid protein
KIFNIQVKEVTTSN

SEQ ID NO: 1897 - protein, 14 aa, synthetic construct
  REGION 1..14: note = peptide derived from viral capsid protein
GNTSQQQTDRNAFY

SEQ ID NO: 1898 - protein, 14 aa, synthetic construct
  REGION 1..14: note = peptide derived from viral capsid protein
LEDNLSEGIREWWD

SEQ ID NO: 1899 - protein, 14 aa, synthetic construct
  REGION 1..14: note = peptide derived from viral capsid protein
SESVPDPQPIGEPP

SEQ ID NO: 1900 - protein, 14 aa, synthetic construct
  REGION 1..14: note = peptide derived from viral capsid protein
LIKNTPVPADPPTT

SEQ ID NO: 1901 - protein, 14 aa, synthetic construct
  REGION 1..14: note = peptide derived from viral capsid protein
PQYGYLTLNNGSQA

SEQ ID NO: 1902 - protein, 14 aa, synthetic construct
  REGION 1..14: note = peptide derived from viral capsid protein
DEEEIRTTNPVATE

SEQ ID NO: 1903 - protein, 14 aa, synthetic construct
  REGION 1..14: note = peptide derived from viral capsid protein
NYNKSVNVDFTVDT

SEQ ID NO: 1904 - protein, 14 aa, synthetic construct
  REGION 1..14: note = peptide derived from viral capsid protein
YHLNGRDSLVNPGP

SEQ ID NO: 1905 - protein, 14 aa, synthetic construct
  REGION 1..14: note = peptide derived from viral capsid protein
TRPATAPQIGTVNS

SEQ ID NO: 1906 - protein, 14 aa, synthetic construct
  REGION 1..14: note = peptide derived from viral capsid protein
GETTRPATAAQTQV

SEQ ID NO: 1907 - protein, 14 aa, synthetic construct
  REGION 1..14: note = peptide derived from viral capsid protein
IFNIQVKEVTTSNG

SEQ ID NO: 1908 - protein, 14 aa, synthetic construct
  REGION 1..14: note = peptide derived from viral capsid protein
SNSQLIFAGPNPSG

SEQ ID NO: 1909 - protein, 14 aa, synthetic construct
  REGION 1..14: note = peptide derived from viral capsid protein
TTTSSNNLLFTSEE

SEQ ID NO: 1910 - protein, 14 aa, synthetic construct
  REGION 1..14: note = peptide derived from viral capsid protein
FNIQVKEVTTNDGV

SEQ ID NO: 1911 - protein, 14 aa, synthetic construct
  REGION 1..14: note = peptide derived from viral capsid protein
GQTGDSESVPDPQP

SEQ ID NO: 1912 - protein, 14 aa, synthetic construct
  REGION 1..14: note = peptide derived from viral capsid protein
PQILIKNTPVPADP

SEQ ID NO: 1913 - protein, 14 aa, synthetic construct
  REGION 1..14: note = peptide derived from viral capsid protein
QLKAGDNPYLRYNH

SEQ ID NO: 1914 - protein, 14 aa, synthetic construct
  REGION 1..14: note = peptide derived from viral capsid protein
SFITQYSTGQVSVE

SEQ ID NO: 1915 - protein, 14 aa, synthetic construct
  REGION 1..14: note = peptide derived from viral capsid protein
FGKQGAGRDNVDYS

SEQ ID NO: 1916 - protein, 14 aa, synthetic construct
  REGION 1..14: note = peptide derived from viral capsid protein
YYKSTNVDFAVNTE

SEQ ID NO: 1917 - protein, 14 aa, synthetic construct
  REGION 1..14: note = peptide derived from viral capsid protein
HYFGYSTPWGYFDF

SEQ ID NO: 1918 - protein, 14 aa, synthetic construct
  REGION 1..14: note = peptide derived from viral capsid protein
APGKKRPVDQSPQE

SEQ ID NO: 1919 - protein, 14 aa, synthetic construct
  REGION 1..14: note = peptide derived from viral capsid protein
GKKRPVDQSPQEPD

SEQ ID NO: 1920 - protein, 14 aa, synthetic construct
  REGION 1..14: note = peptide derived from viral capsid protein
KTAPGKKRPVDQSP

SEQ ID NO: 1921 - protein, 14 aa, synthetic construct
  REGION 1..14: note = peptide derived from viral capsid protein
PEIQYTSNYNKSVN

SEQ ID NO: 1922 - protein, 14 aa, synthetic construct
  REGION 1..14: note = peptide derived from viral capsid protein
SESVPDPQPLGEPP

SEQ ID NO: 1923 - protein, 14 aa, synthetic construct
  REGION 1..14: note = peptide derived from viral capsid protein
TAPGKKRPVDQSPQ

SEQ ID NO: 1924 - protein, 14 aa, synthetic construct
  REGION 1..14: note = peptide derived from viral capsid protein
YDQQLKAGDNPYLK

SEQ ID NO: 1925 - protein, 14 aa, synthetic construct
  REGION 1..14: note = peptide derived from viral capsid protein
YLYYLNRTQGTTSG

SEQ ID NO: 1926 - protein, 14 aa, synthetic construct
  REGION 1..14: note = peptide derived from viral capsid protein
DKAYDRQLDSGDNP

SEQ ID NO: 1927 - protein, 14 aa, synthetic construct
  REGION 1..14: note = peptide derived from viral capsid protein
GTNTMATGSGAPMA

SEQ ID NO: 1928 - protein, 14 aa, synthetic construct
  REGION 1..14: note = peptide derived from viral capsid protein
DKAYDQQLQAGDNP

SEQ ID NO: 1929 - protein, 14 aa, synthetic construct
  REGION 1..14: note = peptide derived from viral capsid protein
TESVPDPQPIGEPP

SEQ ID NO: 1930 - protein, 14 aa, synthetic construct
  REGION 1..14: note = peptide derived from viral capsid protein
KNTPVPADPPTTES

SEQ ID NO: 1931 - protein, 14 aa, synthetic construct
  REGION 1..14: note = peptide derived from viral capsid protein
PVPADPPTTESQAK

SEQ ID NO: 1932 - protein, 14 aa, synthetic construct
  REGION 1..14: note = peptide derived from viral capsid protein
DEEEIKATNPVATE

SEQ ID NO: 1933 - protein, 14 aa, synthetic construct
  REGION 1..14: note = peptide derived from viral capsid protein
DKDKFFPMSGVMIF

SEQ ID NO: 1934 - protein, 14 aa, synthetic construct
  REGION 1..14: note = peptide derived from viral capsid protein
LQQQNTAPQIGTVN

SEQ ID NO: 1935 - protein, 14 aa, synthetic construct
  REGION 1..14: note = peptide derived from viral capsid protein
EEEIKTTNPVATEE

SEQ ID NO: 1936 - protein, 14 aa, synthetic construct
  REGION 1..14: note = peptide derived from viral capsid protein
GQNNNSNFAWTAGT

SEQ ID NO: 1937 - protein, 14 aa, synthetic construct
  REGION 1..14: note = peptide derived from viral capsid protein
DDEDKFFPMSGVMI

SEQ ID NO: 1938 - protein, 14 aa, synthetic construct
  REGION 1..14: note = peptide derived from viral capsid protein
PLVDQYLYRFVSTN

SEQ ID NO: 1939 - protein, 14 aa, synthetic construct
  REGION 1..14: note = peptide derived from viral capsid protein
ADPPTTFSQAKLAS

SEQ ID NO: 1940 - protein, 14 aa, synthetic construct
  REGION 1..14: note = peptide derived from viral capsid protein
DAAALEHDKAYDQQ

SEQ ID NO: 1941 - protein, 14 aa, synthetic construct
  REGION 1..14: note = peptide derived from viral capsid protein
DKAYDQQLKAGDNP

SEQ ID NO: 1942 - protein, 14 aa, synthetic construct
  REGION 1..14: note = peptide derived from viral capsid protein
DSESVPDPQPIGEP

SEQ ID NO: 1943 - protein, 14 aa, synthetic construct
  REGION 1..14: note = peptide derived from viral capsid protein
DWLEDNLSEGIREW

SEQ ID NO: 1944 - protein, 14 aa, synthetic construct
  REGION 1..14: note = peptide derived from viral capsid protein
EDNLSEGIREWWDL

SEQ ID NO: 1945 - protein, 14 aa, synthetic construct
  REGION 1..14: note = peptide derived from viral capsid protein
EEIKTTNPVATEQY

SEQ ID NO: 1946 - protein, 14 aa, synthetic construct
  REGION 1..14: note = peptide derived from viral capsid protein
ENSKRWNPEIQYTS

SEQ ID NO: 1947 - protein, 14 aa, synthetic construct
  REGION 1..14: note = peptide derived from viral capsid protein
ESVPDPQPIGEPPA

SEQ ID NO: 1948 - protein, 14 aa, synthetic construct
  REGION 1..14: note = peptide derived from viral capsid protein
EYQLPYVLGSAHQG

SEQ ID NO: 1949 - protein, 14 aa, synthetic construct
  REGION 1..14: note = peptide derived from viral capsid protein
FQERLQEDTSFGGN

SEQ ID NO: 1950 - protein, 14 aa, synthetic construct
  REGION 1..14: note = peptide derived from viral capsid protein
GDSESVPDPQPIGE

SEQ ID NO: 1951 - protein, 14 aa, synthetic construct
  REGION 1..14: note = peptide derived from viral capsid protein
HSQSLDRLMNPLID

SEQ ID NO: 1952 - protein, 14 aa, synthetic construct
  REGION 1..14: note = peptide derived from viral capsid protein
KGEPVNAADAAALE

SEQ ID NO: 1953 - protein, 14 aa, synthetic construct
  REGION 1..14: note = peptide derived from viral capsid protein
KNTPVPADPPTTFS

SEQ ID NO: 1954 - protein, 14 aa, synthetic construct
  REGION 1..14: note = peptide derived from viral capsid protein
LPYVLGSAHQGCLP

SEQ ID NO: 1955 - protein, 14 aa, synthetic construct
  REGION 1..14: note = peptide derived from viral capsid protein
LQQQNAAPIVGAVN

SEQ ID NO: 1956 - protein, 14 aa, synthetic construct
  REGION 1..14: note = peptide derived from viral capsid protein
NAADAAALEHDKAY

SEQ ID NO: 1957 - protein, 14 aa, synthetic construct
  REGION 1..14: note = peptide derived from viral capsid protein
NPGVAMATHKDDEE

SEQ ID NO: 1958 - protein, 14 aa, synthetic construct
  REGION 1..14: note = peptide derived from viral capsid protein
PGAPKPKANQQKQD

SEQ ID NO: 1959 - protein, 14 aa, synthetic construct
  REGION 1..14: note = peptide derived from viral capsid protein
PPQILIKNTPVPAD

SEQ ID NO: 1960 - protein, 14 aa, synthetic construct
  REGION 1..14: note = peptide derived from viral capsid protein
PRDWQRLINNNWGF

SEQ ID NO: 1961 - protein, 14 aa, synthetic construct
  REGION 1..14: note = peptide derived from viral capsid protein
PWGYFDFNRFHCHF

SEQ ID NO: 1962 - protein, 14 aa, synthetic construct
  REGION 1..14: note = peptide derived from viral capsid protein
QLPYVLGSAHQGCL

SEQ ID NO: 1963 - protein, 14 aa, synthetic construct
  REGION 1..14: note = peptide derived from viral capsid protein
QQRVSTTLSQNNNS

SEQ ID NO: 1964 - protein, 14 aa, synthetic construct
  REGION 1..14: note = peptide derived from viral capsid protein
SEPRPIGTRYLTRN

SEQ ID NO: 1965 - protein, 14 aa, synthetic construct
  REGION 1..14: note = peptide derived from viral capsid protein
SGGSTNDNTYFGYS

SEQ ID NO: 1966 - protein, 14 aa, synthetic construct
  REGION 1..14: note = peptide derived from viral capsid protein
SQSLDRLMNPLIDQ

SEQ ID NO: 1967 - protein, 14 aa, synthetic construct
  REGION 1..14: note = peptide derived from viral capsid protein
TGDSESVPDPQPIG

SEQ ID NO: 1968 - protein, 14 aa, synthetic construct
  REGION 1..14: note = peptide derived from viral capsid protein
TIANNLTSTIQVFT

SEQ ID NO: 1969 - protein, 14 aa, synthetic construct
  REGION 1..14: note = peptide derived from viral capsid protein
TQYSTGQVSVEIEW

SEQ ID NO: 1970 - protein, 14 aa, synthetic construct
  REGION 1..14: note = peptide derived from viral capsid protein
VTQNEGTKTIANNL

SEQ ID NO: 1971 - protein, 14 aa, synthetic construct
  REGION 1..14: note = peptide derived from viral capsid protein
WLEDNLSEGIREWW

SEQ ID NO: 1972 - protein, 14 aa, synthetic construct
  REGION 1..14: note = peptide derived from viral capsid protein
YFGYSTPWGYFDFN

SEQ ID NO: 1973 - protein, 14 aa, synthetic construct
  REGION 1..14: note = peptide derived from viral capsid protein
LSRTQSTGGTQGTQ

SEQ ID NO: 1974 - protein, 14 aa, synthetic construct
  REGION 1..14: note = peptide derived from viral capsid protein
TQGTQQLLFSQAGP

SEQ ID NO: 1975 - protein, 14 aa, synthetic construct
  REGION 1..14: note = peptide derived from viral capsid protein
DAEFQERLKEDTSF

SEQ ID NO: 1976 - protein, 14 aa, synthetic construct
  REGION 1..14: note = peptide derived from viral capsid protein
DDEEKFFPMHGNLI

SEQ ID NO: 1977 - protein, 14 aa, synthetic construct
  REGION 1..14: note = peptide derived from viral capsid protein
DGHFHPSPLMGGFG

SEQ ID NO: 1978 - protein, 14 aa, synthetic construct
  REGION 1..14: note = peptide derived from viral capsid protein
DSESVPDPQPLGEP

SEQ ID NO: 1979 - protein, 14 aa, synthetic construct
  REGION 1..14: note = peptide derived from viral capsid protein
EEEIRTTNPVATEQ

SEQ ID NO: 1980 - protein, 14 aa, synthetic construct
  REGION 1..14: note = peptide derived from viral capsid protein
EEIRTTNPVATEQY

SEQ ID NO: 1981 - protein, 14 aa, synthetic construct
  REGION 1..14: note = peptide derived from viral capsid protein
FQERLKEDTSFGGN

SEQ ID NO: 1982 - protein, 14 aa, synthetic construct
  REGION 1..14: note = peptide derived from viral capsid protein
GADGVGNSSGNWHC

SEQ ID NO: 1983 - protein, 14 aa, synthetic construct
  REGION 1..14: note = peptide derived from viral capsid protein
GDSESVPDPQPLGE

SEQ ID NO: 1984 - protein, 14 aa, synthetic construct
  REGION 1..14: note = peptide derived from viral capsid protein
GNGLDKGEPVNAAD

SEQ ID NO: 1985 - protein, 14 aa, synthetic construct
  REGION 1..14: note = peptide derived from viral capsid protein
KKRPVDQSPQEPDS

SEQ ID NO: 1986 - protein, 14 aa, synthetic construct
  REGION 1..14: note = peptide derived from viral capsid protein
KRPVDQSPQEPDSS

SEQ ID NO: 1987 - protein, 14 aa, synthetic construct
  REGION 1..14: note = peptide derived from viral capsid protein
KSVNVDFTVDTNGV

SEQ ID NO: 1988 - protein, 14 aa, synthetic construct
  REGION 1..14: note = peptide derived from viral capsid protein
LSKTANDNNNSNFP

SEQ ID NO: 1989 - protein, 14 aa, synthetic construct
  REGION 1..14: note = peptide derived from viral capsid protein
MASHKDDEEKFFPM

SEQ ID NO: 1990 - protein, 14 aa, synthetic construct
  REGION 1..14: note = peptide derived from viral capsid protein
NNFQFSYTFEDVPF

SEQ ID NO: 1991 - protein, 14 aa, synthetic construct
  REGION 1..14: note = peptide derived from viral capsid protein
PVDQSPQEPDSSSG

SEQ ID NO: 1992 - protein, 14 aa, synthetic construct
  REGION 1..14: note = peptide derived from viral capsid protein
PVPANPPTTFSPAK

SEQ ID NO: 1993 - protein, 14 aa, synthetic construct
  REGION 1..14: note = peptide derived from viral capsid protein
QQRLSKTANDNNNS

SEQ ID NO: 1994 - protein, 14 aa, synthetic construct
  REGION 1..14: note = peptide derived from viral capsid protein
QSSNTAPTTRTVND

SEQ ID NO: 1995 - protein, 14 aa, synthetic construct
  REGION 1..14: note = peptide derived from viral capsid protein
SKTANDNNNSNFPW

SEQ ID NO: 1996 - protein, 14 aa, synthetic construct
  REGION 1..14: note = peptide derived from viral capsid protein
SNYNKSVNVDFTVD

SEQ ID NO: 1997 - protein, 14 aa, synthetic construct
  REGION 1..14: note = peptide derived from viral capsid protein
TTSGTTNQSRLLFS

SEQ ID NO: 1998 - protein, 14 aa, synthetic construct
  REGION 1..14: note = peptide derived from viral capsid protein
VMITDEEEIRTTNP

SEQ ID NO: 1999 - protein, 14 aa, synthetic construct
  REGION 1..14: note = peptide derived from viral capsid protein
APGKKRPVEHSPVE

SEQ ID NO: 2000 - protein, 14 aa, synthetic construct
  REGION 1..14: note = peptide derived from viral capsid protein
FFPQSGVLIFGKQG

SEQ ID NO: 2001 - protein, 14 aa, synthetic construct
  REGION 1..14: note = peptide derived from viral capsid protein
FGKQGSEKTNVDIE

SEQ ID NO: 2002 - protein, 14 aa, synthetic construct
  REGION 1..14: note = peptide derived from viral capsid protein
HKDDEEKFFPQSGV

SEQ ID NO: 2003 - protein, 14 aa, synthetic construct
  REGION 1..14: note = peptide derived from viral capsid protein
KGEPVNEADAAALE

SEQ ID NO: 2004 - protein, 14 aa, synthetic construct
  REGION 1..14: note = peptide derived from viral capsid protein
NEADAAALEHDKAY

SEQ ID NO: 2005 - protein, 14 aa, synthetic construct
  REGION 1..14: note = peptide derived from viral capsid protein
NPVATEQYGSVSTN

SEQ ID NO: 2006 - protein, 14 aa, synthetic construct
  REGION 1..14: note = peptide derived from viral capsid protein
PQILIKNTPVPANP

SEQ ID NO: 2007 - protein, 14 aa, synthetic construct
  REGION 1..14: note = peptide derived from viral capsid protein
QQRVSKTSADNNNS

SEQ ID NO: 2008 - protein, 14 aa, synthetic construct
  REGION 1..14: note = peptide derived from viral capsid protein
QTGDADSVPDPQPL

SEQ ID NO: 2009 - protein, 14 aa, synthetic construct
  REGION 1..14: note = peptide derived from viral capsid protein
ADPPTTFNQAKLAS

SEQ ID NO: 2010 - protein, 14 aa, synthetic construct
  REGION 1..14: note = peptide derived from viral capsid protein
AGDNVDYSSVMLTS

SEQ ID NO: 2011 - protein, 14 aa, synthetic construct
  REGION 1..14: note = peptide derived from viral capsid protein
KNTPVPADPPTTFN

SEQ ID NO: 2012 - protein, 14 aa, synthetic construct
  REGION 1..14: note = peptide derived from viral capsid protein
KRVLEPLGLVESPV

SEQ ID NO: 2013 - protein, 14 aa, synthetic construct
  REGION 1..14: note = peptide derived from viral capsid protein
PYLRYHADAEFQER

SEQ ID NO: 2014 - protein, 14 aa, synthetic construct
  REGION 1..14: note = peptide derived from viral capsid protein
EEEIKTTNPVATES

SEQ ID NO: 2015 - protein, 14 aa, synthetic construct
  REGION 1..14: note = peptide derived from viral capsid protein
EFAWPGASSWALNG

SEQ ID NO: 2016 - protein, 14 aa, synthetic construct
  REGION 1..14: note = peptide derived from viral capsid protein
KSNNVEFAVNTEGV

SEQ ID NO: 2017 - protein, 14 aa, synthetic construct
  REGION 1..14: note = peptide derived from viral capsid protein
MNPGPAMASHKEGE

SEQ ID NO: 2018 - protein, 14 aa, synthetic construct
  REGION 1..14: note = peptide derived from viral capsid protein
PVPADPPTAFNKDK

SEQ ID NO: 2019 - protein, 14 aa, synthetic construct
  REGION 1..14: note = peptide derived from viral capsid protein
TVQVFTDSDYQLPY

SEQ ID NO: 2020 - protein, 14 aa, synthetic construct
  REGION 1..14: note = peptide derived from viral capsid protein
NLQAANLALGETTR

SEQ ID NO: 2021 - protein, 14 aa, synthetic construct
  REGION 1..14: note = peptide derived from viral capsid protein
GGQMATNNQSLALG

SEQ ID NO: 2022 - protein, 14 aa, synthetic construct
  REGION 1..14: note = peptide derived from viral capsid protein
MATNNQSLALGETT

SEQ ID NO: 2023 - protein, 14 aa, synthetic construct
  REGION 1..14: note = peptide derived from viral capsid protein
KKRILEPLGLVEEA

SEQ ID NO: 2024 - protein, 14 aa, synthetic construct
  REGION 1..14: note = peptide derived from viral capsid protein
ADPPTTFNQSKLNS

SEQ ID NO: 2025 - protein, 14 aa, synthetic construct
  REGION 1..14: note = peptide derived from viral capsid protein
KSTSVDFAVNTEGV

SEQ ID NO: 2026 - protein, 14 aa, synthetic construct
  REGION 1..14: note = peptide derived from viral capsid protein
LQRGNRQAATADVN

SEQ ID NO: 2027 - protein, 14 aa, synthetic construct
  REGION 1..14: note = peptide derived from viral capsid protein
PVPADPPTTFNQSK

SEQ ID NO: 2028 - protein, 14 aa, synthetic construct
  REGION 1..14: note = peptide derived from viral capsid protein
DDDDRFFPMHGNLI

SEQ ID NO: 2029 - protein, 14 aa, synthetic construct
  REGION 1..14: note = peptide derived from viral capsid protein
PEPADVFMIPQYGY

SEQ ID NO: 2030 - protein, 14 aa, synthetic construct
  REGION 1..14: note = peptide derived from viral capsid protein
DIYYQGPIWAKVPH

SEQ ID NO: 2031 - protein, 14 aa, synthetic construct
  REGION 1..14: note = peptide derived from viral capsid protein
FEKVPFHSMYAHSQ

SEQ ID NO: 2032 - protein, 14 aa, synthetic construct
  REGION 1..14: note = peptide derived from viral capsid protein
FSAARINSFLTQYS

SEQ ID NO: 2033 - protein, 14 aa, synthetic construct
  REGION 1..14: note = peptide derived from viral capsid protein
HSQSLDRMMNPLLD

SEQ ID NO: 2034 - protein, 14 aa, synthetic construct
  REGION 1..14: note = peptide derived from viral capsid protein
KKRILEPLGLVEEG

SEQ ID NO: 2035 - protein, 14 aa, synthetic construct
  REGION 1..14: note = peptide derived from viral capsid protein
MVPQYGYCGVVTGK

SEQ ID NO: 2036 - protein, 14 aa, synthetic construct
  REGION 1..14: note = peptide derived from viral capsid protein
NQTDRNAFYCLEYF

SEQ ID NO: 2037 - protein, 14 aa, synthetic construct
  REGION 1..14: note = peptide derived from viral capsid protein
RDTDMFGQIADNNQ

SEQ ID NO: 2038 - protein, 14 aa, synthetic construct
  REGION 1..14: note = peptide derived from viral capsid protein
RDWQRLINNNWGLR

SEQ ID NO: 2039 - protein, 14 aa, synthetic construct
  REGION 1..14: note = peptide derived from viral capsid protein
TVQIFADSTYELPY

SEQ ID NO: 2040 - protein, 14 aa, synthetic construct
  REGION 1..14: note = peptide derived from viral capsid protein
DIYYQGPIWAKIPH

SEQ ID NO: 2041 - protein, 14 aa, synthetic construct
  REGION 1..14: note = peptide derived from viral capsid protein
QIFADSSYELPYVM

SEQ ID NO: 2042 - protein, 14 aa, synthetic construct
  REGION 1..14: note = peptide derived from viral capsid protein
THSTLDGRWSALTP

SEQ ID NO: 2043 - protein, 14 aa, synthetic construct
  REGION 1..14: note = peptide derived from viral capsid protein
TVQIFADSSYELPY

SEQ ID NO: 2044 - protein, 14 aa, synthetic construct
  REGION 1..14: note = peptide derived from viral capsid protein
DKFFPMSGVMIFGK

SEQ ID NO: 2045 - protein, 14 aa, synthetic construct
  REGION 1..14: note = peptide derived from viral capsid protein
EEEIKATNPVATER

SEQ ID NO: 2046 - protein, 14 aa, synthetic construct
  REGION 1..14: note = peptide derived from viral capsid protein
EGADGVGNASGNWH

SEQ ID NO: 2047 - protein, 14 aa, synthetic construct
  REGION 1..14: note = peptide derived from viral capsid protein
LFNIQVKEVTTNDG

SEQ ID NO: 2048 - protein, 14 aa, synthetic construct
  REGION 1..14: note = peptide derived from viral capsid protein
QVKEVTTNDGVTTI

SEQ ID NO: 2049 - protein, 14 aa, synthetic construct
  REGION 1..14: note = peptide derived from viral capsid protein
RVSKTKTDNNNSNF

SEQ ID NO: 2050 - protein, 14 aa, synthetic construct
  REGION 1..14: note = peptide derived from viral capsid protein
SDSEYQLPYVLGSA

SEQ ID NO: 2051 - protein, 14 aa, synthetic construct
  REGION 1..14: note = peptide derived from viral capsid protein
HSQSLDRLMNPLLD

SEQ ID NO: 2052 - protein, 14 aa, synthetic construct
  REGION 1..14: note = peptide derived from viral capsid protein
IEMRAAPGGNAVDA

SEQ ID NO: 2053 - protein, 14 aa, synthetic construct
  REGION 1..14: note = peptide derived from viral capsid protein
KRLNFEEDTGAGDG

SEQ ID NO: 2054 - protein, 14 aa, synthetic construct
  REGION 1..14: note = peptide derived from viral capsid protein
SQSLDRLMNPLLDQ

SEQ ID NO: 2055 - protein, 14 aa, synthetic construct
  REGION 1..14: note = peptide derived from viral capsid protein
STGQVAVQIEWEIE

SEQ ID NO: 2056 - protein, 14 aa, synthetic construct
  REGION 1..14: note = peptide derived from viral capsid protein
TTSANNLLFTSEEE

SEQ ID NO: 2057 - protein, 14 aa, synthetic construct
  REGION 1..14: note = peptide derived from viral capsid protein
TTSGETLNQGNAAT

SEQ ID NO: 2058 - protein, 14 aa, synthetic construct
  REGION 1..14: note = peptide derived from viral capsid protein
GESESVPDPQPIGE

SEQ ID NO: 2059 - protein, 14 aa, synthetic construct
  REGION 1..14: note = peptide derived from viral capsid protein
GQTGESESVPDPQP

SEQ ID NO: 2060 - protein, 14 aa, synthetic construct
  REGION 1..14: note = peptide derived from viral capsid protein
ANPGIAMATHKDDE

SEQ ID NO: 2061 - protein, 14 aa, synthetic construct
  REGION 1..14: note = peptide derived from viral capsid protein
EGASYQVPPQPNGM

SEQ ID NO: 2062 - protein, 14 aa, synthetic construct
  REGION 1..14: note = peptide derived from viral capsid protein
EYRTTRPIGTRYLT

SEQ ID NO: 2063 - protein, 14 aa, synthetic construct
  REGION 1..14: note = peptide derived from viral capsid protein
YNLQEIVPGSVWME

SEQ ID NO: 2064 - protein, 15 aa, synthetic construct
  REGION 1..15: note = peptide derived from viral capsid protein
ADTMSAGGGGPLGDN

SEQ ID NO: 2065 - protein, 15 aa, synthetic construct
  REGION 1..15: note = peptide derived from viral capsid protein
AKTAPGKKRPVEPSP

SEQ ID NO: 2066 - protein, 15 aa, synthetic construct
  REGION 1..15: note = peptide derived from viral capsid protein
DVYLQGPIWAKIPET

SEQ ID NO: 2067 - protein, 15 aa, synthetic construct
  REGION 1..15: note = peptide derived from viral capsid protein
GAKTAPTGKRIDDHF

SEQ ID NO: 2068 - protein, 15 aa, synthetic construct
  REGION 1..15: note = peptide derived from viral capsid protein
GQVATNHQSAQAQAQ

SEQ ID NO: 2069 - protein, 15 aa, synthetic construct
  REGION 1..15: note = peptide derived from viral capsid protein
KTAPTGKRIDDHFPK

SEQ ID NO: 2070 - protein, 15 aa, synthetic construct
  REGION 1..15: note = peptide derived from viral capsid protein
MNPLIDQYLYYLSKT

SEQ ID NO: 2071 - protein, 15 aa, synthetic construct
  REGION 1..15: note = peptide derived from viral capsid protein
NHQYREIKSGSVDGS

SEQ ID NO: 2072 - protein, 15 aa, synthetic construct
  REGION 1..15: note = peptide derived from viral capsid protein
PTTFNQSKLNSFITQ

SEQ ID NO: 2073 - protein, 15 aa, synthetic construct
  REGION 1..15: note = peptide derived from viral capsid protein
QYREIKSGSVDGSNA

SEQ ID NO: 2074 - protein, 15 aa, synthetic construct
  REGION 1..15: note = peptide derived from viral capsid protein
SYAHSQSLDRLMNPL

SEQ ID NO: 2075 - protein, 15 aa, synthetic construct
  REGION 1..15: note = peptide derived from viral capsid protein
VYSEPRPIGTRYLTR

SEQ ID NO: 2076 - protein, 15 aa, synthetic construct
  REGION 1..15: note = peptide derived from viral capsid protein
YLQGPIWAKIPETGA

SEQ ID NO: 2077 - protein, 15 aa, synthetic construct
  REGION 1..15: note = peptide derived from viral capsid protein
DSSSGTGKAGQQPAR

SEQ ID NO: 2078 - protein, 15 aa, synthetic construct
  REGION 1..15: note = peptide derived from viral capsid protein
GVVADNLQQQNAAPI

SEQ ID NO: 2079 - protein, 15 aa, synthetic construct
  REGION 1..15: note = peptide derived from viral capsid protein
HSSFAPSQNLFKLAN

SEQ ID NO: 2080 - protein, 15 aa, synthetic construct
  REGION 1..15: note = peptide derived from viral capsid protein
KDKLNSFITQYSTGQ

SEQ ID NO: 2081 - protein, 15 aa, synthetic construct
  REGION 1..15: note = peptide derived from viral capsid protein
KRWNPEIQYTSNYYK

SEQ ID NO: 2082 - protein, 15 aa, synthetic construct
  REGION 1..15: note = peptide derived from viral capsid protein
LEAGDNPYLKYNHAD

SEQ ID NO: 2083 - protein, 15 aa, synthetic construct
  REGION 1..15: note = peptide derived from viral capsid protein
LKYNHADAEFQEKLA

SEQ ID NO: 2084 - protein, 15 aa, synthetic construct
  REGION 1..15: note = peptide derived from viral capsid protein
NSQGALPGMVWQNRD

SEQ ID NO: 2085 - protein, 15 aa, synthetic construct
  REGION 1..15: note = peptide derived from viral capsid protein
PADPPTTFNQSKLNS

SEQ ID NO: 2086 - protein, 15 aa, synthetic construct
  REGION 1..15: note = peptide derived from viral capsid protein
PPAGPSGLGSGTMAA

SEQ ID NO: 2087 - protein, 15 aa, synthetic construct
  REGION 1..15: note = peptide derived from viral capsid protein
PYLKYNHADAEFQEK

SEQ ID NO: 2088 - protein, 15 aa, synthetic construct
  REGION 1..15: note = peptide derived from viral capsid protein
QSGASNDNHYFGYST

SEQ ID NO: 2089 - protein, 15 aa, synthetic construct
  REGION 1..15: note = peptide derived from viral capsid protein
QSTGGTAGTQQLLFS

SEQ ID NO: 2090 - protein, 15 aa, synthetic construct
  REGION 1..15: note = peptide derived from viral capsid protein
QYGVVADNLQQQNAA

SEQ ID NO: 2091 - protein, 15 aa, synthetic construct
  REGION 1..15: note = peptide derived from viral capsid protein
RWNPEIQYTSNYYKS

SEQ ID NO: 2092 - protein, 15 aa, synthetic construct
  REGION 1..15: note = peptide derived from viral capsid protein
SFAPSQNLFKLANPL

SEQ ID NO: 2093 - protein, 15 aa, synthetic construct
  REGION 1..15: note = peptide derived from viral capsid protein
SKRWNPEIQYTSNYY

SEQ ID NO: 2094 - protein, 15 aa, synthetic construct
  REGION 1..15: note = peptide derived from viral capsid protein
SQSGASNDNHYFGYS

SEQ ID NO: 2095 - protein, 15 aa, synthetic construct
  REGION 1..15: note = peptide derived from viral capsid protein
SRTNTPSGTTTQSRL

SEQ ID NO: 2096 - protein, 15 aa, synthetic construct
  REGION 1..15: note = peptide derived from viral capsid protein
SYGQVATNHQSAQAQ

SEQ ID NO: 2097 - protein, 15 aa, synthetic construct
  REGION 1..15: note = peptide derived from viral capsid protein
TANTQTLGFSQGGPN

SEQ ID NO: 2098 - protein, 15 aa, synthetic construct
  REGION 1..15: note = peptide derived from viral capsid protein
TEQYGVVADNLQQQN

SEQ ID NO: 2099 - protein, 15 aa, synthetic construct
  REGION 1..15: note = peptide derived from viral capsid protein
TGQNNNSNFAWTAGT

SEQ ID NO: 2100 - protein, 15 aa, synthetic construct
  REGION 1..15: note = peptide derived from viral capsid protein
TTNPVATESYGQVAT

SEQ ID NO: 2101 - protein, 15 aa, synthetic construct
  REGION 1..15: note = peptide derived from viral capsid protein
WTGATKYHLNGRDSL

SEQ ID NO: 2102 - protein, 15 aa, synthetic construct
  REGION 1..15: note = peptide derived from viral capsid protein
YAHSQSLDRLMNPLI

SEQ ID NO: 2103 - protein, 15 aa, synthetic construct
  REGION 1..15: note = peptide derived from viral capsid protein
YTSNYYKSNNVEFAV

SEQ ID NO: 2104 - protein, 14 aa, synthetic construct
  REGION 1..14: note = peptide derived from viral capsid protein
AAEAAAPAAQPEVE

SEQ ID NO: 2105 - protein, 14 aa, synthetic construct
  REGION 1..14: note = peptide derived from viral capsid protein
AAAPAAQPEVEKPQ

SEQ ID NO: 2106 - protein, 14 aa, synthetic construct
  REGION 1..14: note = peptide derived from viral capsid protein
DASEYLSPGLVQFA

SEQ ID NO: 2107 - protein, 14 aa, synthetic construct
  REGION 1..14: note = peptide derived from viral capsid protein
DGLEFGSPNAPNTN

SEQ ID NO: 2108 - protein, 14 aa, synthetic construct
  REGION 1..14: note = peptide derived from viral capsid protein
APVAAALGSPFDAP

SEQ ID NO: 2109 - protein, 14 aa, synthetic construct
  REGION 1..14: note = peptide derived from viral capsid protein
NLEEEDDDNEDEVD

SEQ ID NO: 2110 - protein, 14 aa, synthetic construct
  REGION 1..14: note = peptide derived from viral capsid protein
EEDDDNEDEVDEQA

SEQ ID NO: 2111 - protein, 14 aa, synthetic construct
  REGION 1..14: note = peptide derived from viral capsid protein
DDNEDEVDEQAEQQ

SEQ ID NO: 2112 - protein, 14 aa, synthetic construct
  REGION 1..14: note = peptide derived from viral capsid protein
VLQSSLGNDLRVDG

SEQ ID NO: 2113 - protein, 14 aa, synthetic construct
  REGION 1..14: note = peptide derived from viral capsid protein
PSEDTFNPVYPYDT

SEQ ID NO: 2114 - protein, 14 aa, synthetic construct
  REGION 1..14: note = peptide derived from viral capsid protein
FPVVGAELLPVHSK

SEQ ID NO: 2115 - protein, 14 aa, synthetic construct
  REGION 1..14: note = peptide derived from viral capsid protein
EEIRPTNPVATEEY

SEQ ID NO: 2116 - protein, 14 aa, synthetic construct
  REGION 1..14: note = peptide derived from viral capsid protein
SGSGAEENSNAAAA

SEQ ID NO: 2117 - protein, 14 aa, synthetic construct
  REGION 1..14: note = peptide derived from viral capsid protein
YEEGPPPSYESVVS

SEQ ID NO: 2118 - protein, 14 aa, synthetic construct
  REGION 1..14: note = peptide derived from viral capsid protein
NAAAAAMQPVEDMN

SEQ ID NO: 2119 - protein, 14 aa, synthetic construct
  REGION 1..14: note = peptide derived from viral capsid protein
AAALGSPFDAPLDP

SEQ ID NO: 2120 - protein, 14 aa, synthetic construct
  REGION 1..14: note = peptide derived from viral capsid protein
NGVLESDIGVKFDT

SEQ ID NO: 2121 - protein, 14 aa, synthetic construct
  REGION 1..14: note = peptide derived from viral capsid protein
AAAMQPVEDMNDHA

SEQ ID NO: 2122 - protein, 14 aa, synthetic construct
  REGION 1..14: note = peptide derived from viral capsid protein
PAQPASSLGADTMS

SEQ ID NO: 2123 - protein, 14 aa, synthetic construct
  REGION 1..14: note = peptide derived from viral capsid protein
TVQVFTDDDYQLPY

SEQ ID NO: 2124 - protein, 14 aa, synthetic construct
  REGION 1..14: note = peptide derived from viral capsid protein
PVPGNITSFSDVPV

SEQ ID NO: 2125 - protein, 14 aa, synthetic construct
  REGION 1..14: note = peptide derived from viral capsid protein
TQYSTGQVTVEMEW

SEQ ID NO: 2126 - protein, 14 aa, synthetic construct
  REGION 1..14: note = peptide derived from viral capsid protein
YLGPGNGLDRGEPV

SEQ ID NO: 2127 - protein, 14 aa, synthetic construct
  REGION 1..14: note = peptide derived from viral capsid protein
TSESETQPVNRVAY

SEQ ID NO: 2128 - protein, 14 aa, synthetic construct
  REGION 1..14: note = peptide derived from viral capsid protein
RARPSEDTFNPVYP

SEQ ID NO: 2129 - protein, 14 aa, synthetic construct
  REGION 1..14: note = peptide derived from viral capsid protein
ATALEINLEEEDDD

SEQ ID NO: 2130 - protein, 14 aa, synthetic construct
  REGION 1..14: note = peptide derived from viral capsid protein
ENSNAAAAAMQPVE

SEQ ID NO: 2131 - protein, 14 aa, synthetic construct
  REGION 1..14: note = peptide derived from viral capsid protein
YLGPFNGLDKGEPV

SEQ ID NO: 2132 - protein, 14 aa, synthetic construct
  REGION 1..14: note = peptide derived from viral capsid protein
NNFEFSYSFEDVPF

SEQ ID NO: 2133 - protein, 14 aa, synthetic construct
  REGION 1..14: note = peptide derived from viral capsid protein
SFITQYSTGQVTVE

SEQ ID NO: 2134 - protein, 14 aa, synthetic construct
  REGION 1..14: note = peptide derived from viral capsid protein
YNKSVNVDFTVDTN

SEQ ID NO: 2135 - protein, 14 aa, synthetic construct
  REGION 1..14: note = peptide derived from viral capsid protein
LGSPFDAPLDPPFV

SEQ ID NO: 2136 - protein, 14 aa, synthetic construct
  REGION 1..14: note = peptide derived from viral capsid protein
PAAQPEVEKPQKKP

SEQ ID NO: 2137 - protein, 14 aa, synthetic construct
  REGION 1..14: note = peptide derived from viral capsid protein
ENSKRWNPEIQYTN

SEQ ID NO: 2138 - protein, 14 aa, synthetic construct
  REGION 1..14: note = peptide derived from viral capsid protein
YLVDNKSTDVASLN

SEQ ID NO: 2139 - protein, 14 aa, synthetic construct
  REGION 1..14: note = peptide derived from viral capsid protein
PPMMLIKNTPVPGN

SEQ ID NO: 2140 - protein, 14 aa, synthetic construct
  REGION 1..14: note = peptide derived from viral capsid protein
PVPADPPTTFSQAK

SEQ ID NO: 2141 - protein, 14 aa, synthetic construct
  REGION 1..14: note = peptide derived from viral capsid protein
DTFNPVYPYDTETG

SEQ ID NO: 2142 - protein, 14 aa, synthetic construct
  REGION 1..14: note = peptide derived from viral capsid protein
ITQYSTGQVTVEME

SEQ ID NO: 2143 - protein, 14 aa, synthetic construct
  REGION 1..14: note = peptide derived from viral capsid protein
AGNLTSQNVTTVSP

SEQ ID NO: 2144 - protein, 14 aa, synthetic construct
  REGION 1..14: note = peptide derived from viral capsid protein
NNFTFSYTFEDVPF

SEQ ID NO: 2145 - protein, 14 aa, synthetic construct
  REGION 1..14: note = peptide derived from viral capsid protein
WVLPSYNNHQYREI

SEQ ID NO: 2146 - protein, 14 aa, synthetic construct
  REGION 1..14: note = peptide derived from viral capsid protein
YLGPGNGLDKGEPV

SEQ ID NO: 2147 - protein, 14 aa, synthetic construct
  REGION 1..14: note = peptide derived from viral capsid protein
FLYSNIALYLPDKL

SEQ ID NO: 2148 - protein, 14 aa, synthetic construct
  REGION 1..14: note = peptide derived from viral capsid protein
NSTGNMGVLAGQAS

SEQ ID NO: 2149 - protein, 14 aa, synthetic construct
  REGION 1..14: note = peptide derived from viral capsid protein
YLKYNHADAEFQER

SEQ ID NO: 2150 - protein, 14 aa, synthetic construct
  REGION 1..14: note = peptide derived from viral capsid protein
LAPKGAPNPCEWDE

SEQ ID NO: 2151 - protein, 14 aa, synthetic construct
  REGION 1..14: note = peptide derived from viral capsid protein
IQYTNNYNDPQFVD

SEQ ID NO: 2152 - protein, 14 aa, synthetic construct
  REGION 1..14: note = peptide derived from viral capsid protein
SHGKTAKSNIVSQV

SEQ ID NO: 2153 - protein, 14 aa, synthetic construct
  REGION 1..14: note = peptide derived from viral capsid protein
VSAAPVAAALGSPF

SEQ ID NO: 2154 - protein, 14 aa, synthetic construct
  REGION 1..14: note = peptide derived from viral capsid protein
GNDRLLTPNEFEIK

SEQ ID NO: 2155 - protein, 14 aa, synthetic construct
  REGION 1..14: note = peptide derived from viral capsid protein
LEINLEEEDDDNED

SEQ ID NO: 2156 - protein, 14 aa, synthetic construct
  REGION 1..14: note = peptide derived from viral capsid protein
YLRYNHADAEFQER

SEQ ID NO: 2157 - protein, 14 aa, synthetic construct
  REGION 1..14: note = peptide derived from viral capsid protein
AAGGAAVEGGQGAD

SEQ ID NO: 2158 - protein, 14 aa, synthetic construct
  REGION 1..14: note = peptide derived from viral capsid protein
VKEVTTSNGETTVA

SEQ ID NO: 2159 - protein, 14 aa, synthetic construct
  REGION 1..14: note = peptide derived from viral capsid protein
EAMLRNDTNDQSFN

SEQ ID NO: 2160 - protein, 14 aa, synthetic construct
  REGION 1..14: note = peptide derived from viral capsid protein
DGHFHPSPLIGGFG

SEQ ID NO: 2161 - protein, 14 aa, synthetic construct
  REGION 1..14: note = peptide derived from viral capsid protein
NMTKDWFLVQMLAN

SEQ ID NO: 2162 - protein, 14 aa, synthetic construct
  REGION 1..14: note = peptide derived from viral capsid protein
VGSGTVAAGGGAPM

SEQ ID NO: 2163 - protein, 14 aa, synthetic construct
  REGION 1..14: note = peptide derived from viral capsid protein
EQYGTVANNLQSSN

SEQ ID NO: 2164 - protein, 14 aa, synthetic construct
  REGION 1..14: note = peptide derived from viral capsid protein
CLEYFPSKMLRTGN

SEQ ID NO: 2165 - protein, 14 aa, synthetic construct
  REGION 1..14: note = peptide derived from viral capsid protein
AHALDMTFEVDPMD

SEQ ID NO: 2166 - protein, 14 aa, synthetic construct
  REGION 1..14: note = peptide derived from viral capsid protein
TMANQAKNWLPGPC

SEQ ID NO: 2167 - protein, 14 aa, synthetic construct
  REGION 1..14: note = peptide derived from viral capsid protein
KRPVEQSPQEPDSS

SEQ ID NO: 2168 - protein, 14 aa, synthetic construct
  REGION 1..14: note = peptide derived from viral capsid protein
KTANDNNNSNFPWT

SEQ ID NO: 2169 - protein, 14 aa, synthetic construct
  REGION 1..14: note = peptide derived from viral capsid protein
TQNNNSEFAWPGAS

SEQ ID NO: 2170 - protein, 14 aa, synthetic construct
  REGION 1..14: note = peptide derived from viral capsid protein
KNTPVPADPPTAFN

SEQ ID NO: 2171 - protein, 14 aa, synthetic construct
  REGION 1..14: note = peptide derived from viral capsid protein
TVQVFSDSEYQLPY

SEQ ID NO: 2172 - protein, 14 aa, synthetic construct
  REGION 1..14: note = peptide derived from viral capsid protein
LDKGEPVNAADAAA

SEQ ID NO: 2173 - protein, 14 aa, synthetic construct
  REGION 1..14: note = peptide derived from viral capsid protein
VLEPLGLVEEPVKT

SEQ ID NO: 2174 - protein, 14 aa, synthetic construct
  REGION 1..14: note = peptide derived from viral capsid protein
KLFNIQVKEVTTND

SEQ ID NO: 2175 - protein, 14 aa, synthetic construct
  REGION 1..14: note = peptide derived from viral capsid protein
LQSSNTAPTTRTVN

SEQ ID NO: 2176 - protein, 14 aa, synthetic construct
  REGION 1..14: note = peptide derived from viral capsid protein
SPPLKKTKSNINLE

SEQ ID NO: 2177 - protein, 14 aa, synthetic construct
  REGION 1..14: note = peptide derived from viral capsid protein
LDKGEPVNEADAAA

SEQ ID NO: 2178 - protein, 14 aa, synthetic construct
  REGION 1..14: note = peptide derived from viral capsid protein
MLRTGNNFQFSYEF

SEQ ID NO: 2179 - protein, 14 aa, synthetic construct
  REGION 1..14: note = peptide derived from viral capsid protein
ARKRLNFGQTGDAD

SEQ ID NO: 2180 - protein, 14 aa, synthetic construct
  REGION 1..14: note = peptide derived from viral capsid protein
NTYNGFSTPWGYFD

SEQ ID NO: 2181 - protein, 14 aa, synthetic construct
  REGION 1..14: note = peptide derived from viral capsid protein
QYGTVANNLQSSNT

SEQ ID NO: 2182 - protein, 14 aa, synthetic construct
  REGION 1..14: note = peptide derived from viral capsid protein
LARPPAPTITTVSE

SEQ ID NO: 2183 - protein, 14 aa, synthetic construct
  REGION 1..14: note = peptide derived from viral capsid protein
FPADVFMIPQYGYL

SEQ ID NO: 2184 - protein, 14 aa, synthetic construct
  REGION 1..14: note = peptide derived from viral capsid protein
STGQVSVEIEWELQ

SEQ ID NO: 2185 - protein, 14 aa, synthetic construct
  REGION 1..14: note = peptide derived from viral capsid protein
LRNDTNDQSFNDYL

SEQ ID NO: 2186 - protein, 14 aa, synthetic construct
  REGION 1..14: note = peptide derived from viral capsid protein
NFQFSYEFENVPFH

SEQ ID NO: 2187 - protein, 14 aa, synthetic construct
  REGION 1..14: note = peptide derived from viral capsid protein
FITQYSTGQVTVEM

SEQ ID NO: 2188 - protein, 14 aa, synthetic construct
  REGION 1..14: note = peptide derived from viral capsid protein
QQPARKRLNFGQTG

SEQ ID NO: 2189 - protein, 14 aa, synthetic construct
  REGION 1..14: note = peptide derived from viral capsid protein
HDSKLSIATQGPLT

SEQ ID NO: 2190 - protein, 14 aa, synthetic construct
  REGION 1..14: note = peptide derived from viral capsid protein
NTYFGYSTPWGYFD

SEQ ID NO: 2191 - protein, 16 aa, synthetic construct
  REGION 1..16: note = peptide
ALGELKLAALCHGEDS

SEQ ID NO: 2192 - protein, 16 aa, synthetic construct
  REGION 1..16: note = peptide
LCHGEDSITIPYQGSG

SEQ ID NO: 2193 - protein, 16 aa, synthetic construct
  REGION 1..16: note = peptide
GEDSITIPYQGSGKGV

SEQ ID NO: 2194 - protein, 16 aa, synthetic construct
  REGION 1..16: note = peptide
EDSITIPYQGSGKGVS

SEQ ID NO: 2195 - protein, 16 aa, synthetic construct
  REGION 1..16: note = peptide
DSITIPYQGSGKGVSF

SEQ ID NO: 2196 - protein, 16 aa, synthetic construct
  REGION 1..16: note = peptide
TIPYQGSGKGVSFQLV

SEQ ID NO: 2197 - protein, 16 aa, synthetic construct
  REGION 1..16: note = peptide
IPYQGSGKGVSFQLVK

SEQ ID NO: 2198 - protein, 16 aa, synthetic construct
  REGION 1..16: note = peptide
PYQGSGKGVSFQLVKL

SEQ ID NO: 2199 - protein, 16 aa, synthetic construct
  REGION 1..16: note = peptide
YQGSGKGVSFQLVKLG

SEQ ID NO: 2200 - protein, 16 aa, synthetic construct
  REGION 1..16: note = peptide
QGSGKGVSFQLVKLGV

SEQ ID NO: 2201 - protein, 16 aa, synthetic construct
  REGION 1..16: note = peptide
SGKGVSFQLVKLGVWK

SEQ ID NO: 2202 - protein, 16 aa, synthetic construct
  REGION 1..16: note = peptide
GKGVSFQLVKLGVWKS

SEQ ID NO: 2203 - protein, 16 aa, synthetic construct
  REGION 1..16: note = peptide
AVPTTRTDDKLRMETC

SEQ ID NO: 2204 - protein, 16 aa, synthetic construct
  REGION 1..16: note = peptide
VPTTRTDDKLRMETCF

SEQ ID NO: 2205 - protein, 16 aa, synthetic construct
  REGION 1..16: note = peptide
PTTRTDDKLRMETCFQ

SEQ ID NO: 2206 - protein, 16 aa, synthetic construct
  REGION 1..16: note = peptide
DDKLRMETCFQQACKG

SEQ ID NO: 2207 - protein, 16 aa, synthetic construct
  REGION 1..16: note = peptide
DKLRMETCFQQACKGK

SEQ ID NO: 2208 - protein, 16 aa, synthetic construct
  REGION 1..16: note = peptide
KLRMETCFQQACKGKI

SEQ ID NO: 2209 - protein, 16 aa, synthetic construct
  REGION 1..16: note = peptide
LRMETCFQQACKGKIQ

SEQ ID NO: 2210 - protein, 16 aa, synthetic construct
  REGION 1..16: note = peptide
GKIQALCENPEWAPLK

SEQ ID NO: 2211 - protein, 16 aa, synthetic construct
  REGION 1..16: note = peptide
IQALCENPEWAPLKDN

SEQ ID NO: 2212 - protein, 16 aa, synthetic construct
  REGION 1..16: note = peptide
QALCENPEWAPLKDNR

SEQ ID NO: 2213 - protein, 16 aa, synthetic construct
  REGION 1..16: note = peptide
ALCENPEWAPLKDNRI

SEQ ID NO: 2214 - protein, 16 aa, synthetic construct
  REGION 1..16: note = peptide
LCENPEWAPLKDNRIP

SEQ ID NO: 2215 - protein, 16 aa, synthetic construct
  REGION 1..16: note = peptide
CENPEWAPLKDNRIPS

SEQ ID NO: 2216 - protein, 16 aa, synthetic construct
  REGION 1..16: note = peptide
NPEWAPLKDNRIPSYG

SEQ ID NO: 2217 - protein, 16 aa, synthetic construct
  REGION 1..16: note = peptide
PEWAPLKDNRIPSYGV

SEQ ID NO: 2218 - protein, 16 aa, synthetic construct
  REGION 1..16: note = peptide
EWAPLKDNRIPSYGVL

SEQ ID NO: 2219 - protein, 16 aa, synthetic construct
  REGION 1..16: note = peptide
PLKDNRIPSYGVLSVD

SEQ ID NO: 2220 - protein, 16 aa, synthetic construct
  REGION 1..16: note = peptide
DQKLWCRHFCVLADSE

SEQ ID NO: 2221 - protein, 16 aa, synthetic construct
  REGION 1..16: note = peptide
HFCVLADSESGGHITH

SEQ ID NO: 2222 - protein, 16 aa, synthetic construct
  REGION 1..16: note = peptide
LADSESGGHITHSGME

SEQ ID NO: 2223 - protein, 16 aa, synthetic construct
  REGION 1..16: note = peptide
DSESGGHITHSGMEGM

SEQ ID NO: 2224 - protein, 16 aa, synthetic construct
  REGION 1..16: note = peptide
SESGGHITHSGMEGMG

SEQ ID NO: 2225 - protein, 16 aa, synthetic construct
  REGION 1..16: note = peptide
ESGGHITHSGMEGMGV

SEQ ID NO: 2226 - protein, 13 aa, synthetic construct
  REGION 1..13: note = peptide
PAVIMGNWENHWI

SEQ ID NO: 2227 - protein, 10 aa, synthetic construct
  REGION 1..10: note = peptide
SITIPYQGSG

SEQ ID NO: 2228 - protein, 11 aa, synthetic construct
  REGION 1..11: note = peptide
PEWAPLKDNRI

SEQ ID NO: 2229 - protein, 13 aa, synthetic construct
  REGION 1..13: note = peptide
GGHITHSGMEGMG

1. A method for increasing efficacy of an oncolytic virus or oncolytic virus-like particle (VLP) based thereon by transient selective antibody depletion, the method comprising the following steps:
(i) selecting an individual having a neoplasm for therapy with the oncolytic virus or oncolytic VLP based thereon,
(ii) administering a pharmaceutical composition to the individual,
wherein the pharmaceutical composition comprises at least one pharmaceutically acceptable excipient and a compound comprising
a biopolymer scaffold, wherein the biopolymer scaffold is a protein which is non-immunogenic in the individual, and at least
a first peptide n-mer of the general formula:
$$P {( - S - P )}_{( n - 1 )}$$
a second peptide n-mer of the general formula:
$$P {( - S - P )}_{( n - 1 )} [ [ ; ] ] ,$$
wherein, independently for each occurrence, P is a peptide with a sequence length of 6-13 amino acids, and S is a non-peptide spacer,
wherein, independently for each of the peptide n-mers, n is an integer of at least 1,
wherein each of the peptide n-mers is bound to the biopolymer scaffold,
wherein, independently for each occurrence, P has an amino-acid sequence comprising a sequence fragment with a length of at least six amino acids of a protein sequence of the oncolytic virus,
optionally wherein at most three amino acids of the sequence fragment are independently substituted by any other amino acid; and
(iii) administering the oncolytic virus or oncolytic VLP based thereon to the individual within 96 hours of performing step (ii);
wherein one or more antibodies against the oncolytic virus are present in the individual which are specific for at least one occurrence of peptide P.

2. The method of claim 1, wherein the oncolytic virus is a measles virus, a Herpes simplex virus (HSV), a poxvirus such as Vaccinia virus, a reovirus, a Newcastle disease virus (NVD), a rhabdovirus, a coxsackievirus, a lentivirus, an alphavirus, a vesicular stomatitis virus (VSS), a myxoma virus (MYXV), a mengovirus, a bovine viral diarrhea virus (BVDV), a chimeric oncolytic virus, a picornavirus, a parvovirus, an adenovirus (AdV), an adeno-associated virus (AAV) or a flavivirus.

3.-15. (canceled)

16. The method of claim 1, wherein at least one occurrence of P is a circularized peptide.

17. The method of claim 1, wherein, independently for each occurrence, P is Pₐ or P_{b},
wherein Pₐ has an amino-acid sequence comprising a first sequence fragment with a length of at least six amino acids of a protein sequence of an oncolytic virus, optionally wherein at most three amino acids of the sequence fragment are independently substituted by any other amino acid,
wherein P_{b} has an amino-acid sequence comprising a second sequence fragment with a length of at least six amino acids of a protein sequence of an oncolytic virus, optionally wherein at most three amino acids of the sequence fragment are independently substituted by any other amino acid; and wherein
the first peptide n-mer is Pₐ—S—Pₐ and the second peptide n-mer is Pₐ—S—Pₐ,
the first peptide n-mer is Pₐ—S—Pₐ and the second peptide n-mer is P_{b}—S—P_{b},
the first peptide n-mer is P_{b}—S—P_{b} and the second peptide n-mer is P_{b}—S—P_{b},
the first peptide n-mer is Pₐ—S—P_{b} and the second peptide n-mer is Pₐ—S—P_{b},
the first peptide n-mer is Pₐ—S—P_{b} and the second peptide n-mer is Pₐ—S—Pₐ, or
the first peptide n-mer is Pₐ—S—P_{b} and the second peptide n-mer is P_{b}—S—P_{b}.

18. The method of claim 17, wherein the peptide Pₐ and the peptide P_{b} are two different epitopes of the same viral antigen or two different epitope parts of the same viral epitope.

19. The method of claim 1, wherein the biopolymer scaffold is selected from the group consisting of albumins and globulins.

20. The method of claim 19, wherein the biopolymer scaffold is transferrin.

21. The method of claim 20, wherein the biopolymer scaffold is human transferrin.

22. The method of claim 19, wherein the biopolymer scaffold is albumin.

23. The method of claim 22, wherein the biopolymer scaffold is human albumin.

24. The method of claim 1, wherein said protein sequence of the oncolytic virus is a capsid protein sequence, a nucleocapsid protein sequence, a structural protein sequence, viral envelope- or receptor-binding-protein sequence, or a tegument protein sequence.

25. The method of claim 24, wherein said protein sequence is a capsid protein sequence.

26. The method of claim 1, wherein the pharmaceutical composition is non-immunogenic in the individual.

27. The method of claim 1, wherein the neoplasm is a solid tumor or a hematological malignancy.

28. The method of claim 1, wherein step (ii) is performed prior to or concurrently with step (iii).

29. The method of claim 1, wherein step (ii) is performed at least once prior to step (iii).

30. The method of claim 1, wherein step (ii) is performed at least twice prior to step (iii).

31. The method of claim 1, wherein at least one of said administering of step (ii) and step (iii) is systemic.

32. An anti-neoplastic composition, comprising a compound and further comprising an oncolytic virus or oncolytic VLP based thereon, and at least one pharmaceutically acceptable excipient;
wherein the compound comprises
a biopolymer scaffold, wherein the biopolymer scaffold is a protein which is non-immunogenic in the individual, and at least
a first peptide n-mer of the general formula:
$$P {( - S - P )}_{( n - 1 )}$$
a second peptide n-mer of the general formula:
$$P {( - S - P )}_{( n - 1 )} ,$$
wherein, independently for each occurrence, P is a peptide with a sequence length of 6-13 amino acids, and S is a non-peptide spacer,
wherein, independently for each of the peptide n-mers, n is an integer of at least 1,
wherein each of the peptide n-mers is bound to the biopolymer scaffold,
wherein, independently for each occurrence, P has an amino-acid sequence comprising a sequence fragment with a length of at least six amino acids of a protein sequence of the oncolytic virus, optionally wherein at most three amino acids of the sequence fragment are independently substituted by any other amino acid.

33. A method of inhibiting an immune reaction to a treatment with an oncolytic virus or oncolytic VLP based thereon present in an anti-neoplastic composition in an individual in need of treatment with the anti-neoplastic composition, comprising
obtaining the anti-neoplastic composition as defined in claim 32; wherein the compound of the anti-neoplastic composition is non-immunogenic in the individual, and
administering the anti-neoplastic composition to the individual, wherein the compound transiently reduces the titer of one or more antibodies against the oncolytic virus or VLP based thereon in the individual.
